United States Patent Application Publication US 2022/0008368 A1 - sequence listing, part 27

SEQ ID NO: 2 - DNA, 58617616 bp, Homo sapiens (residues 56,446,599-58,617,616 of 58,617,616)
  modified_base (1)..(60000): a, c, t, g, unknown or other
  modified_base (24448981)..(24498980): a, c, t, g, unknown or other
  modified_base (24552653)..(24552752): a, c, t, g, unknown or other
  modified_base (24891257)..(24891356): a, c, t, g, unknown or other
  modified_base (24895791)..(24895890): a, c, t, g, unknown or other
  modified_base (24898314)..(24904771): a, c, t, g, unknown or other
  modified_base (24908590)..(24908689): a, c, t, g, unknown or other
  modified_base (27190875)..(27240874): a, c, t, g, unknown or other
  modified_base (58607617)..(58617616): a, c, t, g, unknown or other
aaacacatcttgctccaagggttctagagaaagctttgtggacctgcagttgcttaataactggtagtagctaccattataattattattagtagaagttccagaaaacaaccagacaaaataaggaattaacacaggaagataatggaaatgtttatagtgaagctagcagcatcagcaaaacaagaaacccaagattcctcctatagtccttcccaccccacatcccattaagtcacatcagttaagctgcttctccctctcacattttcctaaaactcttagcttcccttccttttcctttgtaccttcctttgttccttcctgtgtggaatactaacatatcccctcagcccatctccccatcttcaatgtggaaatccttaaaccacaccagacaccaaaattaatcccaggtaaattagttcaatataaagtacaaaatcattacaaactaaaataatatgaaatctaccccaaattctttctaactatggaaataaaaagaaaaattataatgtgaatgccaatacttccaatcacacaaaaatgaaaaaaactttcatataaccaagtagaaaaataagaggtaaataaaataaaaagacttaggaaagaatggggaaatatttgaagtcaaatgtaatgtcatatggttaatgtattttctatatgaaagcttactatacaagcagaaaataaaaaagtcactgctagataaaaggggaaagatcacgaaaaaacaattcacgagaataagtaaaaacagaaaacaaatgctagtaaatctacaagaaagatttatggcctatccagtatgggtaaaccaatatggatatccagtctatccacaagggctcaagaaacaaactggtacttgggaggctgaggcaggaggactgcttgagcccaggagtttaaggttgcagtgagccatgactgcaccactacactccagcctgggtaacagaagaccctgtccctgtctccttaaaaaaaaacaaacaaacatggtgactcacacctttaatcctagcactttgggaggccgaggtgggtggatcacaaggtcaggagttcaagactatcctgaccaacatggtgaaaccccatctctactaaaaacacaaaaattagctgggtatggtgatgtgtgcctgtaatcccggctactcaggaggctggggcaggagaattgcatgaacccaggaggcggaggttgcagtgagctgagatggtgccactgcactccagcctaggtgacagagggagactctatctcaaaaaacaaacaaaacaactaaaaaggagaaagtggaagagccagatggccaaatagagccctccagcgattgccccctctgcagtaacgccaaattgaacaactatccacataagaaaacaccttcataggaaccaaaaattaggtgagcaatcaaagtatcaagttttaacatcgtattcaaagaaagaggcactgaggagggtagaaaagacagtcatcatatgcctgcaccacccctcccccaatgcctggcagtgcagcatggcaacaagagagaatctatgtgtttggaggaggaagaatggagtgatggtgggactctgcattggaactcagtgctgccctgtcacagcagaaagcaacgtggggcagaatttggccagcacccccagaggaagcatttaaatcagctctagcctaagaattgtccaccacagtggtggaaacttgagttccagcaagtacccccaccacagactaaaacactctggtgtcctaagtaaatctgaaaggcagtctaggccacaaggactgcaattcctgggcaaatcctagtgctgtgcttggctcagaaccagtggacttggggtacctgctacccagtgacataccagtgacacaccagctggagtggccaagagagtgtttgtatcaactctctcccaactccaggcagcacagctggcagctccaaggggagagggaagagtaaagaggacgttgtcttgcaacttggatatcatctcaaccacagtaaaaaaaaaaaagtgccaagcagtgtcctgaaggcctcattctaggccataggtcctggacaagatttctagacctaccctgggccagaaggcaactcgctgccctaaagggaaaaacaggcctggaagaatttaccacctgatgaattaagacctcttgggcttcgaataaacatcagtggtagccaggcagtggtagccacaggccttgggcaagaatgagtactacgctggcttcgggtcagacccagcacagtcccagtgttggtggccatgggagtgtttgtatcatcccttccccaactctaggcagctcagcacagagacagagagactccattcattcagggaaagtaagggaaaagaatgacttcctggtaatctagggaattctcctggatcttaccaaagaccaccaaggcagtacttctgtgagtctacaagagtcacagagttactggccatggggtgacccctaatgcaaacatggctgcagtgaacaaagacacatcctagcccctttgaatacatggagagtcttctctggaaggactagtacaaacaagcccagactacaaagataagaataaatacctaattcatcaatgaccaggtactgacaaacatccataagcatcaagaccatccgggaaaacatgacctcaccaaatgaactaaataaggcaacagtgaccagttctggagtgacagagctaatgtgaccgttcagtcagagaattcaaaatagctatcttggcctggcatggtggagcatgcctgtaatcccagcactttgggaggccaaggcgggcgggtggatcacctgagttcaggagttcgagaccagcctgaccaacatggtgaaaccccgtctctactaaaaataaaaaaaaattagctgggcatagtgggacacacctgtaatcccagccgctcgggaggctgaggcacgagaattgcttgaacccaggaggcggaggttgcagtgagccgagatcatgccatcattgtagtccagcctggggaacagagagaaactctgtctcaaaaaaaaaaaaaaaaaagctattttgaggaagctcaacaaaatccaagataacacagagcaggaattcagaatcctatcagataaattttaaaaagacattgaaataattaaagagaatcaagcagaaattctggagctgaaaaattcagttgacaaattaaagaatgcatcagagtctctcaacagcagaattgatcaagcagaagaaatagtgagcttgaagatgggctctttgaaaatatagtcagaggagtcaaagggaagaagaataataaagcatgcctacaggatctagtatatagacccaaaagggcatatctaggagttagtggcttaaagagaaggcagagagactggggtagaaagtgtattccgagatagtaacagagaactttccaaacctggagaaagatgtcaaaattcaagtacaaggaggttatagaacaccaagcagctttaatccaaagaaggctacctcagataatttaataaactcccaaatgtcagggataaagacatgatcctaaaagcagcaagagaaaagaaacaacataaaacggaactctaatacatctggcagcagattgctcagtggaaaccttataggccaggagagagaattatgatatatttaaagagctgaagaaaacaaaaacatttatcctggaatattatatccagtgaaaatgcccttcaaacaggaaggagaaataaagactttcctagacaaacaaaagctgagagattttgtcaacaccagacctctcctacaagaaagcctatagggagttcatcagtctgaaagaaaaggatgctaatgacgaataaaaagtcatctgaacatacaacactcactagcaatagtaactgcacagataaatacaaaatattataatactgtaattgtgatgtgtaaactactcatatcttaagtaggaagactaaaagacggactgacaaaaaaacggcaactacaacaactcaagacacacagtattaaaatataaacaacaaaaagtttaaaagcagaggagataaatttaaagtatagggtttttattagttttctctttgcttgtttgttggtttgtttttgcaaagttaaattgtcatcagtttaaattaatgggttataagatattatttacgagcctcatgctgacctcaaataaaaaatatgtaagagatacacaaaaaatataattcaagaaatcactttcacaaggaagacaagaaggaaaaagaaaaggccacaaaacaaccaaaacaaataacaaaatgtcagtagtaggtctctacttataaatattaaatgtacatggactaaatctccagtcaaaagccacagagtggctggatgaatttttaaaaagactcaatgatctgttccctataagaaacatgatttgcctataaagacacacatagactaaaaataaagggagggaaaaaaaatcccatgcaaatgaaaaccaaaaaagagcaggagcagctatatttagataaaatagagcttaagacaaaaagtatggaaagatacaaagaaagtcatataatgctaaaaggatcaattcagcaaagggatataacaattgtaaatatatacacacccaacaatggagcaccgagatacataaagcaaatattttcagagctaaagagagagacagaccacaatacaataattgttggagacttaaccacttcattttcagcattgcacaaatcatccagacagaaaatcaacaaagaaacatcggacctaatggacctaatagatatttacagacaatttcatccaataactacaggttacacattctgctcagcacatggatcattctcaggtatagaccatgaaatattaggacacaagacaagtcttaaaaatccaaaaaaaagctgggtgcactggctcacacctctaatcccagcactttgggaggctgaggcaggtggattgcttgagctcaatagtccaagaccagcctgggcaccatggtgaaatcccatctttaaaaaaaatgcaaaaattagccaggcgtggtggcacatgcctgtagtcccagctactcagtaggccaaggtgggaatattgcttgagcctagaaggttgaggctgcagtgagttgtgatcgcaccactgtattccagcctgggtgacagagcaagaccctgtctcaaaaaaaaaaaaaaaaaaaaaaaaaaaaaaactttcaaattgaaatcatatcaagtatcttctctgaccacaatggaacaaaactagaaatcaataatgagaagaactttggaaagtataccaacacattgaaattaaacaatataatactgaatgaccagtgggtcaatgaagaaatctcttttttttttttttttgagacagagtttcgctcttgttgtccaggctggagtgcaatggcgcgatcttggctcactgcaacctctgcctcctgggttcaagcgattctcctgcctcagcctcccgagtagctgggattacagccatccaccaccatgcctggttaatttcttgtatttttagtagagacagggtttcaccatggtggccaggctggtttcgaactcctgacctcaggtgatccgcccacctcggcctcccaaagtgctgggattataggcgtgagccaccacccccggcctgaagaaatttcttaattaaaatttaaaaattcctcaaaacaaatgataatgaaaacacaacatatgaaaacatgctgcaacctatgggatacagcaaaagcagtatgaagagagtttgtaacaataaacgcctacaccaaaaaagtaaaaaacttcaaataacctaatgatgcatcttaaagaactagaaaaccaagagcaaaccaaaccccaaattcgcagaaaaaaagaaatagtaaggatcagagcagaaagaaatgaaatttaaattagaaaaccacaaaagagcctgggcgcggtggctcacacctgtaatcccagcattttgggaagccaaggtgggcggatcacctgaggtcaggagttcaagaccagcctgaccaacatggtgaaaccccatctctactaaaaatacaaaaattagccaggcgtggtggcggacgcttgtaatcccagctactcaggaggctgaggcaggagaattgcatgaacatggcagtggaggttgcagtgagccgagattgtgccactgcactccagcctgggtgacagagcaagactctgtctcaaaaaaaaaaaaatgccacaaaagatcaacaaaatgaaattttttcaaaaacataaacagaattgacaaacttttaatcagattaagaaaaaaagagataagaccagagatgcaaaaggaatgattgcaactgatactacagatactcaaaggatcattagagactactatgagcaacctaggccaatacattagaaaacctagaagaaatagataaattcctagacacatacaacctaccaagactgaatcatgaagacatccaaaacctgaacagagcaataacaaacaatgagattgaagctgtaataaagtttcccagcaaagaaacacccaggacctgacagcttcactgctgagttttaccaaatacttaaaaaaacctaataccaatcctactcaaactattccaaaaaatagaggaggacagaatacttccaaactcattctacaaggccagtattaccctgatatcaaaacccaaggacacatcaaaaaaagagcttaatattaattcaagaatcctcaacaaaatactagcaaactgaattcaacacattaaacagatctttcatcatgaacaagaacgattaatcccaggaatgcctggatgctttgatatatgcaaatcaatgatatatataaacagaatgaaggacaaaaaacatatgatcacttcagttgacgctgaaaagcatttgataaaatttaacatcccttcatgatgcgatccctcaaaaaactggttatagaggaacattcctcaacacaataaaagccgtatatgacagacccatggctagtataatactgaatggaaaaaaaacctgaaagcctttcctctaacatcaggaaaataaaaagaatgcccactttcacaactattattctacattcaacatagcactggaagtcctagctagagcaatcagagaagagaaagaaataaaaggcatccaagttggaaaggaagacgtcaaattcttcttctttgcagatgatatgatcttttagttggaaaatcataaaaaatccacctagaaactattacaactgataaatttagtaaagttgcaggatacaaaatcaacatataaaaatccagcagcatttctatatgccaacagtgagcaatctgaaaaagaaatcaagtaatcccatttacaatagctacaaataaaataaaatacctaggaataaacttaacaaacacagtgaaattacaatgaaaactacaaaacctgatgcaagaaactgatgaggacacaaaaatatggaaagatagtccatgctcatggatttgaagaataattattagtaaaatgcccatactacccaaattaatctacagattcaatgcaatccctatcaaaatatcagagacattcctcatagaaatagaaaaggtaatcctaaaatttatatggaaccacaaaagacccagaatagctaaagccatcctgagcaaaaagaataaaactgtaggaatcatattacctaagttcaaattatactacagagctatagtaatcaaaacagcttggtactgagataaaaacagacacacagaccaatggaatggaatagagaacccagaaataaatccatacatctacagtgaattcattttcaacaaagatgttacaaatatatattggggaagggacagtctcttcaataaattgtgctggaaaaactggatatccacatgcagaagacactagactccaatctcttgccatatgcaaaaatcaaataaaaatggattaaagacaaatctacgacctaaaacaatcaaactactaaaacaaaacacgggcaaaagtctccaggacattggtctgggcaaatatttcttgagtaataccccacaaacacaggcaatgaaactaaaaatggactaatagaatcatatcaagttaaaaagcttgggcacagcacaggaaacaatcaacaaagtgaagagacaatctactgaatgggagaaaatatttgcaaactacccatctgacaagggattgataaccatagaatacataaggagctcaaacaactatataggaaaaaaatgtaataatccaattaaaaaatgggcaaaagatctgatagacatttctcaaagacatacgtacacatggcaaacaggcatatgagaaagtgctcaacatcactgatcatcagaaaaatgcaaatcaaaactacatggtatcatctcaccccagttaaaatgacttttatcccaaagcaggcaaaacaaatgctggtgaggatatggagaaaggggaaccctcgtacactgtgggaatgtaaattagtacagccactattgacaacagtatgggggggttcctcaaaaactaaaaataggaactaatatatgattcagcaatcctactgcttggtatatacccccccaaaaaaataaattagtatataaaaaagatctctgcatttccatgtttattacagcactactcacaatagccacatgaccatcaacagtcatgcagtagtatttagccataaaaaaggatgagatcctgtaatctgcaacaacatggatacaactggaaaaccttattttaagggaaataagccagacacagacaaccttcacatgttctcactcatttgtgggagctaaaaatcaaaacaattgaactcatggatataagagagtagaaggatggttaccagaggctgggaagggtagcagaaaaaaggagatggttagtgggtacaaaaatacagttaagatgcaataaatacaatctactatttgatagcacaactgggtgaatacagtcagcaatactttgttgtacattttagaacaactgagagagtacaataggaatgtttgtaacacaataataaaagcttgaggtgatagatacctcacataccctgatgtgattcttacacactatatgcctgtattgaaatatcctatgtgccctgtaaatattaatatatacacctctatatcccgtaaaaattaaagagaaaaaaatttaaaaaggtgaactgccaaggcttcaaaccttctactgcatctcccggacaggagatcctaggcaagttatttaacatttctaagactcaaaccctcatcttgtcacttgggaatgacagagatttctacaagtgttgtgaggactaaatgaaatgctgaacttacaggctttagcacagaatctgcacaaagtaagttctcaataaatgctgactgctattaattcattttactaaataaagagagacattttaatggcaatatccaatactagtgagtatgaaaaatcaaaccctgttgctattgatggtgctgatttgataattctcctttttaagttgtagtcatggttatgatttattacagcaaaaggattcaaagcaaagtgtgcaaagggaaatggggcagactctagaggaaactggtcacagctttcaggagctgtgtccctgtgcagtcacacaggctgcacttcattcctcctgcaacaaattgcgacaacacacccacaatttgtgaaatttcacaattgtgagacctcgcaattgtgagaaatgtcttctagataaagacctagtgcctagggttttttactgggggctggtgatatgacaattcttctgcaaagtaattcagaagtatctagagctccccctctgtgactcagtactatagaaaacaggcaaaagcacttaatgcagatacgctgatgttaataataataaattagaatctaaatggaaaataggacatgagagactagtaacatagaacatttctactaaaacaaaatgtgaaaaaagcagaaatatataaaccttataataacgatgaaatccaatttcattaaataaacaagtaatcagtgataactctatgtataaactgtttttgtcttttcctttttctaaactttgttatatgactaaatttcttctaaacttaaaaacagtattttaataaaggatatttcttcatgttgaaattaagatgtaaaataatgcacgtgtcttctttttgcactgtgcttccatctggcttccgttacacaccctcagaacctggacgtcaccaaagccagacgctcgaggtggtgccgttttctcccagcctacaccaaaatgttgatccctagctcctagatgacgcatcccatctaagcagaaactcaatgaatgctacttaaagaaacaaacatacaaaatatataacttggccaaccaaagaggaacctatttgtcaatgaatccttgaaaagtagctgaaaagaacacttggagaaaagagttaaaaaatatttttaaaagaatcacaaaaatcatgcagatttgaatgttatcgtaagtattaacagagagggcagtctacaccttctctgaaaggaaatacgaaagcagagatgcagggggacaggtgggcataagggtgtggagagctgagcttctggaaacaggcagaggctgtttggcgctctgaagagggtctgggcctcaaaccctcctctgctgctccttcctagctgggtgaccttgggcaagtcaacaaacctctctgggcctgtttgcttatctataaagtaggggtaataacagcacccaccttatggggttgttgggaggaagaccctgaacttagaagagtgcttgatacctagtaagggcttactaaatgttgctttttcttcctccaggactcatactgaagagacttgaattctctgtacaggcctggagccttcagtgggagaggcacacaaataatctcttaaagagattgccccctcacaattacatgagctcttatgcagaacacctgcctctatgctgcaacagattgaacgtttatgtctccccaaatgcctatgttgaaattttaccatctaaggtaatggtattaggaggtggggcctttgggaggtgtttaagtcacgaaggtggagccctcatgaatgagatatcatctataatcacctataatctctctcccagagagctccctcactccttcctccatgtgcagacacagcaaaaaggtgccacctatgaaccagaaagcagtcctcaccagacaccgaatctgctcatgcattgatcttggacttctcagcctccagaactgtgagaagtagatttctggtgtttgtaagtcacctaatatatggcattctgttatagcagccccagtagactgagacatatgccttggttctctgtcactcaccaggagcccggcgtcttcttactggctctaccatccagggtgctttccctttctccaataaggtgatcacatttggtctccgaaaggaaagacctgtacgtgggacaaacatgggaaatgatcataaatgtgggcaccacagaagtcagagccacgctctgcatcaacaggaatgcaggtttagtagcatgaagggagcacagaggatgtgaagggcagctggagaatggggagtgtgatattgtgatttataagaatatgtatttgcttttcatccctgtttccggcacacagctccttaaaccctgggaatctcctgcatatgtgtcttttctatgttaatgagaagactgtgactgggggctcctggacagccttcagatgggggctggttgccgatcatgtgattagaggattggaactttcagccccatctcctgacctctggggaggggtcagaggctggaggttgagccaatcactaatggccaatgatttaatcaaccttgcctacctgaagcctccttaaaaactccagtggactgggtttggagagcctcagggttgctgaccacgtggaaggtggtgcagtagagggtgcatgctctgtgtccctccccccataacttaccctctgcatctcttgcatctggctgttcaactgcatcctctgtaatatcttttacactgagttggtaagcataagtaaagcgcctccctgagttctgaaagctactctagcaaatgactgaacttgaggagagggtcatgggaatccgctaatttagagctggtcagttggaaggcctggacatgcaactggcctctgaagtaggggacagtcctgtgggactgggctcttaccctgtgggatctgacactatctccaggtagacagtgtcagaattgaattggaggacacccagctggagtgtgctagagaactgtttggtgtgtgtgggaaaacctccaaacatctggtgttagagtgtgcggtgttgagtttggttgtttaaatctcacatggaaaggcaggaatctaaattatagccagtagagttgttaaattttaattcgacaaagcaaactattttcctgagaattgagtcagaaactcctgaggctggttatgaagttactgtctttctgctccagaccctcacccttctattatctgttttgtggtgccagggtgggggccttgctgtcttcacttctgcttcaccagctgcttcctgtcaacatccaccaataggggctttgttggtttctatgtctgggttttttagttctgtactcccagaaccagtttcatctggctcctcagaagtataaacaaaccaggcagcacactgccccctccttcagaagttctgagtcccagatccgaggggaccttccttaaagcgctaaaaaccccaaactcttccctttgtccctccaaccccaggaatggtggcagcatcctgcaattactgtctctgtgttacatcaatgtccactattcacctttcaacaacacctcttaaatcaattccttaaattctatcaaaagagggctgagtgcggtggctcatgcctgtaatcccagcactttgggaggccgaggtgggcagatcacgaggtcaggagatcgagaccatcctggctaatacggggaaaccccatctctactaaaatacaaaaaatcagctgggtgtgatggagcgtgcctgtaatcccagctactcgagagactgaggcagaggaatcccttgaacccaggaggcggaggttgcagtgagctgagattgcgccactgcactccagcctggcgaaagagcaagactctgtatcaaaaaaaaaaaaatttataccaaaagaattcaagagttacctacagagtttccataagacccagcaattctacccctaggtatatgccccagagaaatgaaaacatacatccacacaaaaaatttgtatatgttcatagcagcatatcaaaataacaagagtgaaaacaacccaaatgcccatctattaactgatgaatggataaacaaaatgtggtctatccataccatacatattctttggcaatgaaaagaaatgaggtattggcacatgctacaacatgatgaacctcaaaaacattagaaatcaaagaagccacatatttatgatttcatatgtatgaaaggcccagagcaggcacaaccagagagatagaaagtggactagtagttgctgaacctggggggatgagtggccaggggagacgaagagtgactgcttatgggtactgggtttttgggtggaaataatgaaaatataattgattgtggtgatggatgcataactctgaatacactattataaaaaccatttaattgtgtactttttatgggtgaattgtatagtatgtgaattatatctcaataaagctcttttaaaaaagaaactgcagtggcttccattttcctgactagacccagagtgatgcatgtccctcaataggctggttctggattgtgggggacgaagagccttaccaagcgagaccaggttccggtaattctccaacatgacatcttcatacaaatccttctgaatggggctcagccattcccactcctcctgggagaagtagatggctaagtccccaaatgttataggtgcctgaaatgaaaaatcaaatgtctattcaccatggacttgtgcttccacatggctggaggaaatggtgcacacatcttaaacatgggagacacaaggtaccaagaatcattcaggaagcattcagggttctgaggccaaaaggggcaggtgtattaaataagttaaataaaatacaatataagacatagctgttattaaaattatgttgcattaagaacacgtggcaacctggatctaccaggcatttacaaagtcaaagcattcttctaagcacctgactgtactggctcacttagtgctcatgtgaatcagtgatagaggcactgtcagcggaatcacagtatgttacagatgaggaaactgaggcccagagagatgagaaaacttactgcaggtctcacagctagtaaatggagaagctagtgttcagcccagacagctcctgatttaatctcctaaccacttgctctccaagaaacatgtgaatatgttacacatgacaaaaggttctttgagggtataatcaaggttactgatcacttgaccttggcagattatcttggacttgacctggccagttggttattggttcttgctgtcttgaagatgaaaaatgagggtcaggtggaaagtgtaggaaggaactgaatctggccaataaccagcaagtctggaagaggacctgagccccaaatgagaacacagccggctgacaccttgatttcagccctgtgaactccaaagcagatgacccagctaaaccatgttgtgcctggacgccaaccacaaaactgcatgataataaacacgtgctgttttgagctgccaagtttgcagctaatctgttacagcagcaaggggcaactaatacacccaactgaaagcaaacacatttgttatgggaaactgcatttgagatgcctgttggaaaaaccactcaatgattgacagtcgtggagcatgctgaccacaggaggctacgcatacaacctcactgcctgcaccagtgcagtcaatggaatagcagggctatgtggtgccttttagtcttgggaccttagttaaagagatttcctccatgtaaatatgggttttacaaggagatacaaaaccacacaacaagactaactccagagcacatgtcaagtcccctctgctactgcaggccccacctgggcattcatctccatgctgagaaatcacagtggctctcatcttcctccacggaggacatttctcttggggagggcatttctcctggcactggcaaagcccctgggaatgctaaacaaacaggccagtggccatgtgcacactgggaatggagagaggctcgctgagcagtttcctggctgctgggcccttctcaggttctcatccctcatggcaacgggagaaaaccaaagactaggtgttggatggatctccaacaggcaacaagtctccatggaaggaaagcaaatggtccacatctcacaagacacgatggggtgttccggaaggaagaggaattgccacttaccttggatttggatttcccccgtgcagaaggcatcctttcctccccctttagggtccacactgagagatgggcagagagctggtaaggcagggctgtggggagaagacaggtcatgaggcagtgccagagtccacaggcccctacctaacctggagacacacacacacacagacacacatgcacacatatgcacgtgcacacacacacacagatgtcagaacacctggcgcattcctgtcccccctcacctgctcacggtcagggaagggcacggccaaccctttttgtgcctaagatcatagcaggttcttggtcatgaggcaaataaggactgcacagacctctggccatccatctgacaagtatttactgagcacctactgggtgtccagctgtcccaggtactggggggagagcagtgagttaaagtggaagagtgccggctcccaagcaccttacattccagtagggaaagaaagtccatataaagcacaatgatggacatggtcattgctatgaagaataaacaggccagggcaggggttagagtcgtggaatggtcagggaaggtgtctctgaggaggtcacattgagctgaggtctaaatatgagagcatgagccatgtgggtgctaggggaagagcattccaggtagaggcacagcaggtgtcagcgtcatgggtgggcgcaggctaggtgtgaggagagcaaggtctgtgtactgaggcagagtgagtgcagcggggagggtgggctaaggcaggcagggccggatcatgaaaggggtgctgagcagctgggatttgatctcaagtgtgacatcactgggggaggagggggagctgagaaggggagtgacaccatcagacaacatttaacaaaaatttgtggcatgtctatatggtgggttaactgtgtgtcagaagagggagcaggagtgaggacaggactcactaggtagctttgcagaaatccggggaagatgttggtggcatgactagggtgggtggagtggaggaaggaagatgtggtcagatcgcctcctcaagagggcccctctatccacccatctcaaagaatctctgccctgtatcagtctatacctatgctgtccaatgtgaatgccactagccacatatgaaaactgagcacgggaaataaaactagtggaactgaggaactcattttcttccctttttttttcttttgagacagggtcttgctctgttgcccaggcgggaatgcagtggtgtgatcttggctcactgcaacctcaacctccccggctcaagcgatcctcccacctcagccttccaagtagctgggaccacaggcacctgccaccacactcagctaatttttgtatttttcagagacagagttttgccatgttgcccaggctggtctcaaactcctgggctcaagcaatcagcccgcctaggccttccaaagtgctgggattacaaacatgagcaactgtgcccagcccggaactcattttcactccaatctattcactattaaaacaataataaaataaaatttaaaattattgctaaaattattaaaatttactgtaaatttaaaatgaaaaactgatactcaatttggttaccgtaaaactttaaagtatgtctggaacaacttgggtatgtgactctgcttttccaaaggttttaggaaattaagtacagatcaggtatctccactgaaaattaagggtctagatggaccgtgtgtataaaatttgtatcagatttcaaagactcagtatgaaaaaatgtaaactatcagtatgaaaaaataactatttcattgataactgtttatattggctacatgttgaaatgttaatattttgatatagtcagttaaatgttattaaaattaactttaatgggccagcccaatgctttgaggctgatgcaggaggatcacctgagcctaagagtttgagagcaacctgagcaatgtagtgagaccctgtctctataaaacattaaaaaattagctgagtgtggtggtgtgtgcctgtagtcctagctacttgggaggctgagatgggaggattgcttgagcctgggaggcagaggttgaggtgggccaagatcatgccactgcagtccagcctgggtagcagagtgagaccctgtctcaaaaacaaagcaaaacaaaacaaaattaactttaatgataaatgtgttgctttttacccttttcaatgtagcctctggaaaatgtaaaattatcagcctcacattatgtttctgtggggcagtgctgccacatgctctcttattgtattgccccattttccacatagcacttaccgctttctgaaaacagcttctttatgtgggtgtttatgtgggtagtacctcccccctccctaaacacacacaatgatctaggctggaaagcagagactttgttttgttcaccgctctactcccagggctgagaacctacctagcatagagcaggtgctcaataaacacttgttgactaactcaaccagatcctcagtgtgctgaaaccccatcccagagacacagttctgctgcagccattccctggccctccacatttgtctttggagaggacagaaatggggacatacttttcacttcccttactgtggaaagcttgacatcttgagaaaatgatacaatgaatgcctaattactcttcaccaaatgttaacatttttcctacccttttttataaaaaggcagttgtctgaaagttgtagaatgacagttcatccctaaatgttccagcacacgcctccaaagaatgccatcgtcataccctgctgccaacaacagcagaaatatccccaaaagctttttgtgactttgtaatgaaaaaagtacagcaggacacagcctggaaaatggaaataatggatgttccctctacagatgtttgtttcgtccccgtaggggtggaggtagaagaagataaatccaaggccatcaggcttgagttcagagttaggtaatggatatgttttgatacaaaacatggatcctaagatggccttatcctatttaagagaagctaggcagaagaatgcttggattattacatgtctctctttgtaggatgaagttgtagtaagaatacgaatactaagatgaattattaacaagatgaataaatgttccatgtgctaagcaacactgaggattatcatttcaattctcacatctggtggcaagtccagttctgacgccgttttccagatgggaaggtggaagcacagagagggaggaatcacttgcccaacgtcataaggtagaccagtggcagagccagggttcaaacctagacatttgccccaaatgcctggctcttaaccctactgtgtggcaccctcccctctgcccatgtcagaggaaacaagctgagcagagaagatcagcagggcaggcttgaggctgctctcccaagaggcctgtgtgcagggtcagccccaggctggcgtctaaggacctggctgggagaccattccctacacggatataaaacttttcctgactgttaagaataccttcagcttcatggtgtggtgcagggagcatacaatttacgccttatgttgaacccctgctttcctcctgggagtctgcaattttgttatctgccaaccagagaatgccgacgtaaccagctcacaataacaaatgtggacactgagtctctaatgggcatgctgtgtagacagcacctcgcatgtgttgttctaactcgttactaagggaattagtatgtcactcaggactgcactgggagaggactccagggagcctggccctggcttccccaggctctgctctgtgcacccttccctttgctgatactgctctgcattttttggctgtaataaatcattagctgtgagcatgactacaggttgggtcctgggaggccctcgagaatgctggaacctgggaggtggccctgcagactccgaaacataagccagtaagaggtaacccccactctatcacacccctcagctgtatcagccttagaatgaggatccagcgaacagtcattctgcaacagatggagttgaggtgggcacatgatcaatgtcctggccccaatgggaggcagctggaggtgtggtttcccagcccctcaggatggtgccctgagccacaccccacttctctggtgctcttgttagagggacccctggttaccaggcctctggtttaataaaacatgactagagtgactctgtcttaaagtgagtagctaggcgctcacaaggcccctgctataaggttaatgcttacagtatgaaagtagccacatcctgagctgaccacctattacaattacagaaaatttatagacacacagaacatctcccaccaagcctgcagaatgtccagatgtcctgagagtgcagcccactttactcagagataacatcaatgaccaggcttaggctgaaggatgaatggtcattgatagcacaaacagccctacctttagtgagtgcatctgcacattccaggtttaatgacagctccttacagtttcccattccttctcctgctttctgagaacaccctactctataacagggtagtttccaataaacttgcttctttcactgtgctctgtgactcaccttgaattccttcctgtgcaagatccaagaaccctctcttatggtctggattgggaccctcttttccagcaacactcactgggcaagaaggggcggggtcccatgcaggtgagccatggtccaggaggggcctctaattagcactgtgtgccatgccggccacatcatgctaaggggaatacttgacttcatctgcctgggaatggggtgggggggaaatgagggcactgtgggcattagtgactgtggtagaccagagttatggccacccccccaaagatatggacatcctaatctccagaacccatgaatatggcaccttacacagcaaaaggaactttgcagatgtgatgaagttaaggatcttgggggcgggggaaattatcctgaaaatggaaaacacacaaaccatttttcctctgctgtcacaccacaacaatccatgaccacatgtgtgaggagttttccacacaccaagcaagcaatcatttctgcagcggccccagctgggtgtcctccaactcaattctgacactatgttcctggggacagaatcagatcccagagcttgaggtctcagcccccaagactgccccacctgccccaccttcagataccagttgcaagtctggacttcaggaatgtttgactgactggctttaagctggggttcccacaatccccttttgggttcaattattaataatttgctaaagcagcttacagaactcaggcaaatactgacatttactggttgattatgaaggctattccgaagaatacagagaaagaaatgtgtagaaatacaaggtatgtgtgaggtggtgtggagcttccatgccttccttgggaaccctccaggaacctccatgtgttcagctatccagaagctcttcaaaccctgtccttctgagtttttatggtggcttcattacacaggcaagattaaactactggcccttggtgatcaacttaacctttagtctttctcccctccccagaggttgaagggtggagctcaatgtcccaactgtctagtcctgccttggtcttcctggtgaccaaccctatcctgaagctacccaggggctgccagccaccagccatctcattagcatacaaaagacatgtaaaagaaaagggcatggtgcctcacacctgtaatcccagcacttcgggaactgcttcaggcaaacctgtttcccattttattactaaccacgtacctccctcacaatatgcccaaaagaaaattctttttggacagaggacacacagaactcatgagataaatgcatacctgattgctccctttgccctatttcactaagccagaccaaggcataagtgactactcctctaccctcctgtcacatgtaaactgtgtgttcagtgaaaggctcatcagagacttgaaggaatgcaactgtttgtctcttatctacctatgacctgaaaggcagggcccttgcttcgagttgtcccacctttctggaccaaaccaacgtacatctcacacatactggctgatgtctcatgtctcccaaaaacatataaaacctagctgtgccccgaccaccttgggcacatgtcaggacctcctgaggctgtgtcacaggtgtgtccttagccttggcaaaataaactttctaaattgactgagacttgtctccgatattttgggttcacagacatcactttagaaattgtaagatttcaggagttttatgccaggaaacaggctaaaggctaaatagttatttctcaatagcacaatcctggattgcccaagtgggctcaacataattacaaaggtcctctttataaaacggaggcaggaggatcagagtcagacagaaaaagaaattgcaagatggaagctatgctgctggccttgaagatgaaggagcacctgctgccatggcttcgtagctctgcctttcaggactgtaagagaataaatgagtgtagcttgaagccatcaagtttgcggcaatttgtcacagcagcaagaggaaatgaacacagtgacccttccactatttccttccagtcctcatgcccaataaatgggcttcttttgtcagtgacctggtgctgaaaacatctgtaattcaggggaattacagggctagggtgagatgaagaggtcggctggtgatcgctgaagccggcctgtgaggccactccaagaggcagaaaggagcgctgaaacatcagccctgcctgcctccctcttgcacacgtgcacacacacccacgcacgcacatccagagctccctcatgctgaggaagctcagggtcctgccttgttttagccagggtcagagggaagggtgaggcggcccccagtggtggtaaacacatcactctggggtcagactgagggtggcaagtgttcctatcagctgtgttaccctgggcaagccactgaacctctctgtgccacagtttcctcacctctcaattggggacaatacagaacctacttctggagggagttgtaagaatgaagaatcacgtttgggtcctacacccccacccccatgccagtgcctccctgctagtccctgaaggggctgccacagccccacctcacttccttcagtctgctcaaacctcaccttctcagcaagcctcactaaccattctatttaataatgcaagctgccccccaccacccttcacggctggttcagatattttttttcagcagctcttatcgtggtgtaactcgctgcagaatttgcttattatgcttactgtcaaccgtcctgaggacaggcaactctgtattccaagtgccttagaccagcatccagcacacggaaagggcttaagtgtttgctaactgaatgactgaatggctttgtaataaatattaactttctttaccaacactttttcaaggagccttccctcacccactaaaccggggtaggggtatgcttcacatgtatcaggtgccacttcttcacagcggaaacacattccattgtgagcacatttgccttctggctttatctcttgtcctccaccggacaatgcattgaccaatgttctcatgtgtgcagctgtgtgaccttgggcaagttactgaaccttgctgggtctttacctccctcctttacatctgcaaagggaggacaaagggctgctggaggatgagatgagatcatatcagtcagtgctccgttaaggtaaactctatttaccctcactgctgttgaggttacaagtgccaggtggggccagttctgtgggatgtgagtttgggaaaaggtcgcattgaccgtccttagcccacatgctctatgcacgtgctcaggtgtgtgtgctgaatgtgctccatgcctgggcagcagcgtcacctcctcagttaatgacgatgagaatgaaagctgtgctggctcctttctatgcatcacaccatctcctttaaccttgaatggcaaatcaaccacccagggtcctcatcttccatcgcggggatgagagagggacgatgacccgcctgttgtcacagagctttaactgatggagcctggatttgaggccctatccacaagccgcacactctgcactcctcacacatggcaggagtccactatccaccctggcagggcacgggaggcatcggtgtggtgaaatgcttccggaaaacatccccatatgtatgtttctgtcatagtagagtggccacaggagttggggaaaatttgagcatatcatgttaagactgaggagcgagggctcggtgacgaactgagcagactggccttcgattctgacttttctgagcgaggtttccttcgtacagagatggggaccaagaggcctgccctgaatcctggacacctgaattctgggctgtgttagaccctaggacaacggtgtgctggggaatgtttaataagcagcttgctgcaggggtgatttatagtgtttacaacttccatggagtaaatactctgatatggtttggatctgtgtccccatccaaatcccatgtttaattgtaatccccaatgttggaagtgggacctggtgggaggtgactggatcttgggggtggatccttcgtgaatagttgagcaccatccctttggtgctgttcccgtgataagagttctcacgagatccagttgtttagaagtgtgtagccccaccccccctgcctctttctcctgctcccaccatgtaagacacctcctcccactttgccttctgccatgagtaaaagtttcctgatgcctccctgaagctgctatgtttcctgtacaacctgcagaaccgtgggccaattaaacttttctttaaaaattaccagtctcaggtatttctttatagcagtgtgagaacagactaatacacactcccaccacagcaggttgtaagctattgaactgatgtcacctggcatggggctgaatggcttgggtgagccagctccagcacaccactgctgcagggcctttgagaacaaagccctattctttgcctgggaattcttaaactttgggcagatatccctgaagagtacaggagggctaatgcctatttctatggtttgagatatatcccaaagcagctgcccataacagaaaactcttttgatttcttgttttgaaacacgttcatttgtgcatattacttcataataaatctgggtttgtgttaatgtaaaaatcatgttttaaatgatttaccagataagcagatcagttggctttccccttccaattacttaggtaaaatgacttgttccaggaagttgtaatgcattcatcccgcagttttcacaggtgtgtgcactcagccacgcaccccaaatttgagaagatgattcttgtctgatatggtctggctgtgtccccactcaaatctcatcttgaattatagctcccataatttccacgtgttgtgggagggacccggtgggagataactgaatcatgggggcggtttcccccatgctgttctcatggcagtgagtaagtctcatgtgatctgatggttctgtacagggactctcattctccctgtggccatgtaagacgtgtctttcaccttccatcacgattgtgaggcctccccagccacgtagaactgtgagtctgggtatgtctttatcagcagcacgaaaacagactcatacattgtccataaaataattttcttcaaggaactcggcactactggggaagaaagaacagcagtttgatattaggtaatcctggattcaaagcttgcctctgccaattactggctgtgaaaaagttacacaaagcctgtttgctcatctatacaatggggtaaagaaaacctacctcacctctgctgttaggatatttacatgtgatgtcttcggtaactggaacatggtcattgcttgccttccttttccttttcaactcacaatacagttgacccttgagccatgttagtttgaattgtgagggtccacttatatgcagatttttttcaatagaagttacactgagtgtgcctacctctccggcctcccccttccggctcctccacctcttccacctctgagacagtaagaccagctcctcctcttcctcctcagcctactcaacttgaaggccatgacgatgaaaaccactctacttcatgaacagtaaatatattttccttatgattttcttaataacattttcttctctctagcttattgtaagaatagagtatgcaatacatgtaacacacaaaatatgtgttaatagactgtgtaggttattgcttaggtgtcagtaaggtgaccagtagactattagtacttaagtctttggggagtgaaaactctatgtggattttctacagtacagggggttggtaccactaacccctgcactgttcaagggtcaaccacataccaagcatccaagagaccaacgaagactgagacccactaaaaaggctgagattagaattcttatccagtgctggaggagataaattggtgtaaattcaatggagggcaatttggcaatgtctttaagaccgaagatacacgttatttacccctgttgtactctttaatccagcaaccttatttcctgtacatgtcttcagacatctttgcacatgtgcacaatgagagacacacaaaggtattcacaatggcagagtttatagaaaggggcagtacatttccttgggtaaggggtgggcctgcagcaggctgtctatgttcagtatttaactctgccgtccgctatctgtgtggacttagacactctatgtgtcctctcccggcctgagcttcctcatatgtaagatgagacaaaacacagtaatgacttcacagggttgtggtgaagatcaaatgagtcaaaatacgtaacacatttagagtggtgccaggaagcagggccaatgctaagattttcattattactaccaccatcaggagattggaaacaacctaacagcccatcaataggagaatggctaagtgaatattacatgcatataatgagacaccacatattaaaagaaacaaagtagaaccatagtagtgattcctaactgggggtaattttgccccctatgggaaaactgcaatgtctgaggctatttttggttgtcacatctgggagtaggggtgcccctggcatctagtgagtggaggccagggatgctgctcaccatcctgcaatgcacaggacagccctccagagcagagaaggatctggttcaaaacatcaactgcgccaaggctgaaaaacctccaagataaaatggtattataagggcaaaaacatagaaaagtcatttagaaaaaaacaaaatatagtatacaaatacatgactttgaaaaggctctggaaagataaacaaaaagtttgtagcagtgactgtccctgaagaaaggaaccaggttatatgtgtgagtatggaaaaatccaaaacccgctttggcattttgtgtcatgaacgtataattacatcttcaaaacaacaaatgaaataaaagaaggctggatcgcacataccacatcaaggcagggctgtaaacctggctcgtcttccgagtccctgatgatagatgagaaagggctttgaaaggcacaaagctatgtcctcctgaggtgaggacggctggaacctggatgggaacatgcttcaaagagttactgaaccgtggttgtgcctcccttctgaggcaaataactgaggggccttcccctcctgccctggcacccctttgagccttgggggctgtgctgggtattgaattgggggagggtcctgatatactgaaaaccagccattaaatgcactgccacagcctcattgcctcctttgggccagtcagcttttgctgtaccagctgtcaaatattcaaaaatcactcctggcctgaacctgccagccccagaggccagggacatacgtaggcaatttctccaaagacgtcagcacagctgtcacaggaagaacacaggctatgcatatgcatgtctagcctgccatttccccactttgcccgggaacacattaggttacctcacttgcaggatggggctaggaatacccctactgcagggaagtgcagctgtgaggactgtttttgataagatagccaagcagaggtcacttgcatcctccccctgactcctccaaatcaatttatctcattcccagaggccccaaaggagcctgagctgcaggcactcagagctgtagctcttaaccctgtgcgtacattagtctcttgggagctttctaataaatagtcacagctgatggcagttcactatgccagaccaattaaatcagaatctctggggattgagtctgacccgcccttttttttctttttttaaataaagcattccaaggtgagagtaacattgaaggcatcgtttagaataacgttcgagtctcagagtctcaaggacagggctagagatctgacctctttctgttgaagtccagacctcagtgaagagaaaagtctttggttaagatcaaagtcaaactcttagattccccaatcaagtgataccaaagggtcactgctggtggtccttcctggctctggagttgaccaaaatgcccatgggagacctggatgttgactccaaaaagaacacctgccaaacaccctgtaatccctttaccctgctttacttttcaaagtacctatcagcacctattatagactttatttttgtctctcctactaaatgcaagttccagctgagtaaaaaccttgcctgttttgttgagagactagcacagtgcccaatccatggtaggcactcactggctgaatgaatgaatgcatctcggagcttacccgggctgcaggccgtttcttctcatctcagaacactatccttttatcatctctccgtgccccgccttccccagctcccttactcttctccctgtcatcatgccttcggtctgtccatgcgcttgcatcacggtcctctcaatcagagtgattttgcccctgcaggggacatctgacagtgtctggagacatttttttttcgcttgtcacaacccagagggaggcgcggtgtgctactggcctggtaaatagagcccagggttgctgcacaacatcctataatacatagaatagcagcccctcccacctcccaacaaaaaactatctggccccaaatgtcacagtgccaaggctgtgaaacactggtctggacagaaacatttccagacccatgtgttatatggaaacatcccttagtccctgacacttcaaagttctgttcttgaccccatgggctccctagggacatctccatcaggaagatcctttgttcctgaccccacctcctctaccctaatgctgccctcccaggaccctgcctacacaattctgaacctaagccctgatctagacgtccaagttattttacctctggacctgcaacccttactctggggctcatccttttgcatttctacctatggattttattctccaggtgtgggacgcctgcggttattatgctaataataaaacgatgatcattgatgtggcacttccttgtgccaagttctacttatgctcaccataaacctgaggttggttctgttattactactgttttacaagtgaaccgaggagtggtggacttaagtaagctctctcagtcacacagccagccagtggtgaaaccaggagtcaacaccagacagcggggcgccacagtccatgctcttatttttccaagctaccttggtaggaaggggacacaaccatacttagcgtcagtggagggctctgtcctccactcaaatgtacacatgcagaaaactgacgacgcaggtggttggcgggggcagcgcaccactgctcaactggagatggtcagatgccctggtatgtggacaaagatagcccagtccgaagctcagagatgcaaagtcctccagtattcaccactacctctgcctctgtatagggtcaaagaaaaacgaccaccagcaccataaccaacacctaaacacggtgattagtatgtgacaagctctgtgcagggtgtttcagctacgtcatcccatttaatcttcccaataacacccaggcaggtgctattaatatgctattttaccaaggaggaaagtcatgcacaattaaacagttccacagatttccagggcagcccatcacatcttagagctgctaagaattcttcccctgtgggcctccatttccatggttacagtgagatatacaccagaaaggcacagtcacacactcataaccgcaaagccactgacgctaagtggcagacagacgcccaggcaagtcacacagtaacccaaggctacaataaacgcccacatcagcctgacactgacacacgcacacactccagaaacacaaatcttcacagtcagcgtcacacacccactcccggcttcccaatggctccattgtttccttcgcgtgggtcacgcagcgatacacatccgcggtcccgacatagctccctcacacacaggcacacacggctcgcctcacacgcggcgccaacttcacacttgggcgcacaagccccgagaaccacagcagcgaagggcgcaaaccccacgccgtggcgggccgagaacccacgcaggcgcgagcccaccgcccacgcaagcacccgcgcagacgcccacgccatcgtggatgcgcaaacccacgcgcgccttggcaggaacgtccacgcagtggcgggcgcgccgcccacgccctcagacacacccacactctcgccagcccccttacctcggtcttcccgggctcagaccccggcggcgaccaccgagacagccgagcagggactcagcgcctgcgcactcccctccgggaccccgggaccgcgcgctgcaccccccttcacacacgcaccacgcatgcgggcgcgtggccccgcccccaaacaaggccacgcggcgtgcgctcacccgcctctcggggacagtaccaccagccccggcctgaggccccgacccctcagcgccacacgcacaagcgcgttcgcacgattggtgcaggcggacgcgcgaggtcccgcgcctgcgcacacccccgaggctggcacgcacaccggtctcctaggggactggcgcctggccctgcttttcatcctctcaggagatcacgtgtggacactgaggcccttcctcgagctctttaaccaaacccaacctccccaattcgccgccttccccgctcccacaaccacacgttcccgtgtgagggcttattgcctccagccagccagcgtccttcgcccccacattcacgaggtttggagccggcctcacccgcggaggcggacaccgcccacccgcgcgtgcgcactacgcagtcatcctgcgacctccagaatccaccggggtgcagcgaggctgtggaaagtcccacccagaacgtgaggtgaagaaggcttgggctgcgctggttctgctctgtccgggtcggagatgaactgacccgggagagcagcggagggatgtttcttttggccaacagtggggactcacctgcacgttttgcgaagaggcccacagtcctttgcgtggcgctcggactacatttcccaacggcccctgcacgccctgggggctgttccatgcggtgttgcgcctgcgtagccggcgggctggcagtgagactgactgcgtcggggttgagactgggtggatgaggctcaccccggcggggagaagggacgaggaggggcggacagcggaaggtccgggagtgtccgccataaagtcgtttgaggtgaccgttgcgtaattgtgagtctgtgagagaagatgtgaagtatggcctcgtcccggtcatctgggcgtgcgggtcccgggttttgatcgcgcgtttgtgtaggtgagacccacattgtgttaccctgaacatgtgtgaggacgaacctttgtgttttcttatacgtgtgtctctgaggcgatttttgtggttttgtacgtggcggggggcactgattttgaatatgtgtgtatgttctggacatttgtttagcttctgcatccacttctgcggaagggcagagttgagtaggtgggaacaggtactgtgtggccccacaaagcctgaactatttactgttgactctagagcccagtttttgcggtgtgtacgtctctgtggggaaccacacattttgaatatgtatacttgtgtatatttacgtctattctatgactgcttttgcacaatggcagggttcagtacttgcagcagagatcttgtggcccataaagcctaaaatactatccgactaaggtttcgagccgtagccagtttttgtggatgagtgttgtgtgtgtgtgggaagccagtgattgattgattgattgattgatttgggacggagtctcgctctgtcgcccaggctggagtgcagtggcgcgatctcggctcactgcaacctccgcctccaggttcaagccattcttctgcctcatcctccctagtagctgggactacaggcgcccgccaccacgcccggctaagttttttgtatttttagtagattcggggtttcaccatgtgggctcttgacctcgtgatccgcccgcctcggcctcccaaagtgctgggattacaggcgtgagccaccgcgaccggccaaggaaagccagtgtttttgactctgtgtgtgtgtacccgcctgtgtgttgagacccagtttttgtagttgcataggtgggtatatgtgtgaggggaacccagggcctgtgatttctttcttcccaggtgactctgagcaagttttggggactaggtagtagggagaatgtgtgaggaactagttttggtttcccatttctgtgattaggtagtagcaataataaaaataaaagctaacagatactactattaggacttttaccattacctctgtgactagcagctagcacttactgattgttgtccctggtcaaaagtgaatttttccatttaaggttttctttaatcctgtaagccgttctctgagttgttccttggagcaagtttctttctagactggagattgttctaaatacctggtaatactagaataaggggtgtggtcaagagatccaagaaatcttaggataaatctgtcacttggcagtttctttgttttctttaaaccacctcccaagaaagtatgtcatcctttctgctgttttaggggcatgttagtgcgaaaatctgggaaaaagctttatgcctcagactgtcctagttcagagaaaccagagtgtgtgggtcggatgtcttggctcctgatcaggctctgttgtgcccattctccgaataaagcaactatctcccaagacacccatgagttttctaagacagtttgtcccagagcccaggtccagaatctagtcctggtcttggatttggtcagaccttccctcactctcacctcaggactccccaccacttccccccctgccccaggaacccatgggaattacaggcataaattaaatacctgatcctatgacagctccagagtatctggaatcttttttttttttttttgagacagtgtcttgctctgtcgcccaggctggagtgcagtggcgtgatctctgctcactgcaagctccgcctcctgggttcaggccattcttctgcctcagcctcccgagtagctgggactgcgagtgtccatcaccacacccagctaatttttttgtacttttagtagacacggggtttcaccttgttagccatgatggtttcactctcctgacttcgtgatctgcccgcttcagcctcccaaagtgctgggattacaggcgtgagccaccacgcccagcccaagatttaatttgttaaaaaaaaaaaaaaaaaaaaaaaaagtagggtaaagacgctagaaagtctagagaggaaggagggattattttacacaggatggtcaggggaggccactttgataggtggcatttagcagtgaggcttcctgaactcagcatgactgctccgcttggctcagattccagctctgtccactgtagttgaggaattatccctagacagagaatggggagataaagaggctcagcttgttaacaggttcccctctcacatgaatcttttgtccactgcctcaaaactgccccgatatagtttaatttcgtagtatgctattgtgtcatgctgcaactctttcagctccaaaagggatggcaccaggttcaagaggctgaagaagagactcagatccaggaaatgaggcataggttatatgtgagatggaacttacatacagagtggtccagtggtggtaggctgaacaggagaactgccaccgcctgcagaaagcatggactttgtatagcattttcacttaatactctcctcctaacagcatccacatggcaaccctcatttaacccaagacaaagagcctcagcccccatagggccagcgttccacaggacaggccagggactcatttaacccaagacaaagagccttaatcccctatagggcccacgttccacaggacaggccagggactcaggcatttatcatagataaagatgaatctccatgttggtcatatttggaactccgaacatgtattcaggtgcgtctgccatgctgggtcattttcagagtatgcttaagttattgctatcagtgtctaccatacacagttggatctaccatacatagttgcatctgccatatgctatgataggaagacttgtctagtacaagcttctgtatcatagcccatagcagaactcatatttgtgagtattgtttgaagggattaagcagagagaattgagtcaggatatcactggggaggtatacagtttatttgtgggatttcaagggcctgaattgtgacaacagaataaagttcttgtgggagaaatattttcagaggatttgagagcatggtgttgaagagttaaggaaacagcatatatcttttcgtgctagatgcttacatgcaaatgaatctccttatgctgtcacaaatgtatgcttctctctccctccctttcacttatcagtcacatcccactagtcctggagcttctcctaccctgaggtcaggcatgaaccctggtgtgtagttttgctcaaatgcttacgatcgataacccagttgtgcaccaggtttctttatatcttgaagttatctactgaacacatgaaaaataaattcagcaaattatagaaactacgagacactgctgtctaccctttgacaaacatttactcagtgttgtgtgctggcttatttgcattgtgttttgcaaaagtcttaaaatcacagtcatatctaggtttttttcaagcaattctcctgcctcagccccctgagtagctgggattacaggcacctgccaccatgcccggctaatttttgtatttttagtagagacagggtttcaccatgttagccaggttggtcttgaaatcctggcctcgatggtatacacattcctatggaaggcaagcattatcttgtgaggtacatagctgatatgatgcttctgcatggtcttcaaagaaggggggccttatctttcaagaaactgaatgaaactcttcttaaagcaaaaataaggctaaagagaatatgactgtttaagatctacaacttcatctgcttatatgtcccatctccggtcctaaagccaactctttcctcatcaagggtccaactttggcttgggagacttgtgtagttgagaaattgagcctgagtcacctcttccaataagtgcatatgctcggacttgagctctgcctgccctctgactgcaagagatgacagtttctttaaatgctccttttgatattcacgctttagaatgctgattaaggtatctgagattgttattttctctgctctttgcattagtagcactttttaaaaggcacctattccacagtcctaatggttgctatttctgctgtactaatcaaaggctagaggtactgcacatggcagggcattcttctgcacctatatcccatcacagtatataatcttagcaattgtactgtgaaagctggccaggagctgtctgtccttttgatgtccgtttccttgatgcttagtgatatagagcatttctcatatacctgcttgccatttgtgtgtcttattttgagaagtatctattcaggttttttcccattttaaaatcagattatttagttttttgctatcgaattgagttccttacatattctgaatattaatcccttgttagatgcatggtttgcaaattactctttcccaatctgtaggttgtctctttacctgcccaaggcttatggctgccagtgaattgatttgaggctgcctgccagtgaattgatttagggctgaggccattttagtcagccagcagtgaagtggtctgggacatgggaccctcctgtgtgggtggcagattctcttctggcctggggtggatctaaaatctctgttcatggccaccattctgtactcaggggccttgaggttctgcccagtgctgtgttttactgtggcagggcaagtacttgtaccatgcacgtttccctctccttcctttaaggccttccgtgctatgctgcctagggttggaagaagggaggtgaggccagtgggagagtatccttcttactgtcttcaattgtctttccttgttatgctaagaccaggtactgtgatctttcatctagtttccttagctcttgtgaatatattttcttgcatggatagttgttgaaatttattttcctgcctgggggtttgctgaagtgttccttcctgccatcttgctccacctctctgttccttgaccttttctagtgaccatgtcttctaccccatcagccactcaactaaaagattaccccacctgtgtttcattaataatgtatgtatttccaccatcatttcaatgtcacatatctatattttaagaaaatgtgcattagcagctactccatttccacagtacttcaactcgagaattacaattgagtgatctaccttcatcttactatccctttcctctcatgagctaatttacttcatagcccacattgagatgctgaaattaattactttagtcactttaattactttagtcacttctttgcattttttgctagagagaattcatctgataaacactaatcccaagtaaactcaactttaaacatgacaggagatgaaaccagaaaaccttgcttacttatctctctttaaccttaatgtccacttacaccaagacttgttgcctgagaaaacatcataccttatatttctgctttaccttcagtagcttcttccaatcttctctttcatccgatgaccttgaggcacatttaatgagtaaaccaggatgggtcaggaagaagttccacatttcccaacaggacaatcatccccctgccccctcccattactgtggatgagctgtccatgttcctgctgaagggcaaccactcatctgaggctcacttttctcactgctttgcttacttgctcagggtgtagctctaataattatgagcattgtctgctgtaataattatgagcattgtctgctctaataattatgagcattgtcttccacataattttcctactctcttaaatcattctagaataataaaaatgttctggaatttcccttaatttaaaaacactgttactctaagtcatgcatactctttaaacaactcccccatttctctgttccccatttcagaaaagatcctaaaaagagtagtctttgttctttgtctgtggctccttgataacatttttccttgaacacactgggcctctaacgccaccattgaaattgctcttataaatgtcaccaaaagttgtccatgatgctaaattaaaggatcaattagtccttcttctacctaaatctttaccaagatgtgaggttgctgatgaaccccccatccttgaacctctttttatttggccatttgatgattgacaccatcattttccacgtggattacttcaacaacttgttaactcattctgtcacttttttatagtcatgtattcttaacatatcaggtagattaattttataaaaccttaagtcagatcatgttctggtctcctttaacttctccagcgactttctacctcacaaagaatagaatccagattcctcacaatggcctagacaactctaatgaaaccccacactgtgatctctcagattccactttagtcccactggcctcctgtgttcttcctcaaacgtggctggtttgcttccacatcaaggttttgtacattgctgttcgtttacctggaatgctcttcccttggggagcccagcaaataggtcaatatcatcctctccttgaggtcttcccaaccaccccattgtagactgcaggttgaaaatggaatcttcccaccctgtgaagtcagcaacctcattctttccagtgcccactgtgtggtgagcatgtttaggctttattacagggtctcagatgaaggtttgacctgtaataagtcacatgtctgccctctgtttttctccataggggttctattcagcctctttggtgggataaacattccttattttcagtatatgtgaagaaagactcactccacagggctagggcctagatcagcactgtgagcagaagaaactctctaagaagaaaacgtgagagtgctctacatgatgaacaatatctagaaaatgagtgtggccaggcctggcacggtggctcatgcctgtaatcccagcactttgggaggccgaggcgggcggatcatgaggtcaggagatcaagaccatcctggccaacacagtgaaaccccgtctctactaaaaatacaaaaaattagccaggcgtggtggcaggcgcctgtagtcccagctactcgggaggctgaggcaggagaatggcgtgaacccgggaggtggagcttgcagtgatccgagattgcaccactgcactccagcctgggcaacagagcgagactccgtctcaaaaaaaaaaaaaaaaaaagagtgtggccagaggccagatggtttcccaagatatacactattcattaacaatgctctgttttcagaagtcttcttcataatcttaaaaatactccatttcttagtcattcaaagtcatgagccacttatgttattttataaagtcaaatatttttcttgtctcatgtcttagtgtatcaatagaagaagggaaattcagtctttatttctttcacatcctaatactagaactcttaccttttctcatgaaccatcctttactgtgatgcatatagttatcaagtacccatttatggctagtgttccattattggaatgctaagcatgtgggagttatatcctactgttcaagtcattgccaaggtctgattgcagaaattcaaaaaattgcaacctcaggcataaatggtaaggaatagttgctcattttattatctttcatggtctggaaggatgtgtgcttaatgacttgagttcagttcttctgggcttagtttcttgcccagtaattggctgattatctctacactggctcttatgtcctaggatgagaaccacaagagagaggacatgagggtaaatacaatggggaaaaagaaaacaaacagtggcagcagagaatgaagatgaggaggaaagaaaaaatgagaaataggaagagaatgagtttgttatgctcgtctggcaaacgtgtaatctgaataaatgatagagaatagtgtttataagagaatgctcttcagaggcaaatagactgtttaaatgccgttagatctgagtgtccttgatacattcttagcctgaaaactagaggaacatgggctggcaaaccaacactgacataaataaatggcaaggaatattaaaaaagaaaacaagttttgagagctacgggaacatataactttaggatattaattatttcagaaaaggcttttatgaagtagtgaatttttttcattctttcttgaatagttttatttttaaataagtttggattaccaaagagctgcagagatggtacagagtttctatatacacattccccagctttccttaatgctaccatcatatagaaccatggtaccttagtcaacctaaaaccttcacattggtacaatactctcagagaaactgcagactattcagatttccactgtttttccaagtattatcttttttagttccaggttctagtcacaaatctcacatttctttaagccatcatgtcccttagtctacttgggtctgcaatgattcctcagtctttatcttttatgaccttgtcactcatcaggatttttatcaaatgtccctcagtttgagtttgtgtgacttttgtgtgtgtgtgattagtctgagggtatgaatttttagggagattatatgctagataattttaagctgttttgtaaagaattagtcaaatcaatgcaaggacaccataaatttttctagcagaagaaacagcaacagcatagatggtgagtgggaaatgattatggtgtattttacctcttttaatccaacttaaatctctaagatagagctatctttcaaccaaaatgaccagctttcctaattttgtatatcacccatgtaaatggactagaacagaaatgatagattccccagttttccctcttttattttcttctctaccccataaatggttattaactgactctttgtgagatttgcaaaacagttctttagagtgggattgtcccaaccactctgagcaagggacaagaaaaccaagagaggctagaacagtaggtttcacaatagacgaaaactgccacctgagttcagacacagagatatactcctctcttctcatcctgtaaaactcaaaccttggttccccttgaggagagcccggcctttagctgccccaatgcacattgactgaactttaagctctatttcagccacttttgatggcacccatccctttctgtgcatgtctttgaatattgacgtgctccatccttgctggaatccaatttcctgtcaatcttggaatatataaatacttcttgctccatttttgaagccccctcaaagccccatcttccttcccacccattcctgacactgcctctgggtttctagaattcatcaaaattttccctagaattgttgatagccctcagcatgtatatgttaagctcttcctcaatacatgcatgaaatgttgccagaggaaataagaaaattgaataaataacatttgccacctaactggaacaatgaagaaaaggcagacagcgaccatccttgatcttctcactgggataacctttgaatgggacagtggaatagaaccattaatggagggaagatagctgtgaaatggtgtgaaagagagtgaattttggggaaagatggttacctgatgcagttcctcacatgctactatcaggacattcttttttcctctcatttgtagccagccatgagtgtggtcataccatgagtcatgagtcactgtgagaaagatgaggaaaagaggtgatgggtttgattgtctgcacagttgcagcccactgtatgcatgccataagtagttaaggagcacatgggtgaagtgaatggaaatccttttcccttttttctcatttgcaagagaaatagaattctgcccttactgcctagatacaaggcagcaggtgctgtgtgagatcgagtattgaagataagtttcacctctacctgtgaagtggattttcaattatgaagaaaattcagttagcaaatataggagctaaacttcattgttcttttttttttgaagtcaatgactttgttgtttctatcatgaatttagttgctttctcttatgccagaaaatgatgtaattaatggctgctaacacatgttttttgcttatcttctacccaccaagaaggtttttcctcacatttgcactgtattcagatgactgtggctggaggggtcatgtctcaagggatcctgttacttggatattgttgacatatagtgtggggcatctgacacatgcacaccagcatctccccttgatatttttagtcttcatatcaagagtaaacttgctgtttctctctgtaaatctggacagtaaaatagaagaactaatattcaggaatggtcagcttgctttcgggtcatacgtaatagaaacctatgctgaaacataaaaagtgaaacattcaagcagaaaagtgcagagattgagggaattctgtttgattccactgctccagctcattctaaggaggtcgagttgaattcttatgtaggattcattgaaaaagcatagtgttttcataattgcccttttgctcaaattatttacatttaatatttcttgcaactaaaggtttggcataattcagtaaaagctatggctgtggacatgatggtgctgaagtgcaaataatgaagtgatctgctcaattccatgtagatcatataccccaagaacttcaaataccaaagtggatgcttttaaaaatcttacaataaagatgccaagtatttttacatttttttttaatttttattttttgagacagaaccgtgctctgtcatccaggctggagtgcagtggcatgatcttggctcattgcaacctcactgcctctcaggttcaagctcttctcctgcctcagcctcccaagtagctgggattacatgtgcccaccaccatgcacggctaatttttttgtatttttagtaaagacggggtttcaccatgttagccaggctggtctttaactcctgacctcaagtgatccgcctgccttagcctcccaaattgctaggattacaggtgtgagccactgcacccagccagagatgctaagtatttttgtaacatggagcagctctgaacactttggtcaataagaaaattgaggctcgtagaagttaaaccattcttctgctgaaaatagctagtaaaaggttgaataatcgctgtttgaatgccgacattgggacctctgagaggagagcatttatgcaggaacatgctagatcatggactttgggagcatgttatgctgctatagcaaaaattgtactagttaaaaatatggttactccatgaattacaaggtaatctcacaagatgccagataattgcacaagctggcagaaagaaaaatgatgttttaaattttttatttttggcatgatagcctttaaaaataacttttatggaagtccaccctttaaaaacaatattttaaaaaattgaaatacaggttaaatttgaagctctttaatatagtgattaaagctgcacatgatgttgaccatgcagatattagtaccttaatgccttcaccacacctaactcccatcctggttctaagctgtaccagcttttctcacctcatgcagtttcctgagtttgtccttcagcttggttccttggtagcctagtctacaggtttttctttatatcttattttttttaagttaacaatggatcctggaggccactgtgcggtgatgtggcagtattccctattcctgttttaagttgggtactattccagaatattgtcagtggcaattttggttctttcttgtttgctatttcaagtaaagaacatttgaatagttttgtaaatccatctttttttgtgtttttgcttttgtacttcttctgtttgataagggggaattctgcatgaacatgtaactgcaggaacgtgagaatttgcaaacttttcctacatagatttatgtcattttccatctaaccaccaatatatgagcatgcctgtctatgagagtctcaccactagggtgattggaatgatctgaatgctagctgtggtaggcagcaggtcccccagtacacacacaccaaagatgtccatatcctaatcctcaaatctgtgaatgtgttacttttcatagcgcaagtgactttgaaggtgtgattaaagaatcttcagatggggagattatcttggcctatccagctggagacagtgtaatcacaagggtcattttaagaggcaggcataagtggcaaaagcagagaaagagatgtgatgacaagaaggatgtggccatgtgacgaagtgagggcagcctctagaagctagaaaaggcaagaggtagatcctctcctggagcctcaggaatggcaggtagctaggcccacagattaattttagctcataagacatattttggaattctgaactgcagaacatggcagtttaaacaaaactgcttagttttaactgctgtatttgtggtaattcatcacagcagagagaaactaatgaacctcctagtgtgataggtgagaaatggtatctcggtgtggtttgaattacacttctcttattttgagtatggtaagttgtatttttaaatggtcacagcacttagaataatttggagggacaaagcatgttcactgagattctgttgctaactggaggtaccagagatttaaccaacacctaggtttggagggcaaaatttgtttaaaccatgagacagtaagacctggacgtagaaactccaccattcttctaggaacccctattttgagtcatagtcaccatgtccttgaagaaaccattcaaaatattcttcagatgactctggatttttgaccatccttattgctctccagaaatagtaactagaaataacagcatctctgggatttctcactatgtaaataatcgtaaatgaaaaaggggatattgagaataaatatatccatttcctttgctccaggatttttgcaagtggataaaaaaatttaactcacattagagtctttggctgtagctcagccttctttaaatcattcatttaacaaaatgtattgagaacctactatgtgctagacatacagctataatggatcaatgaaagaagtctgcgtccgagtcctctgtacatttatggctaagggctgggctgtacaggcatggggcaagatcaccagaattttaccaaatagtagtgacttctaacagcttcttaacactcctgttatctagctgagtcattgaaagcagccagctacaaacagacacattccaggcagtggagaaagaggagaaaaatgccccctaacttctcatcagaaaaacaaaggcctaatgaaaatggaaagttgtctttaaagtgctgaagggggaaaaaaaaccttcatgctaaatatgcttcacgtatgaggatgaactcaaggtaatcttagaaacatgaaagctgtgagaatttattgctgtcagctctacacgacaacgaattctaaagtccttcagtctgtgaggaatcatagtgtatgtcaagggggaaggaaggaagaagccaagaaacagtaaaggagtaaatttaaaagacattttctttcctcttccaattaacttaaaagacagctgagtgtttaaagcaaaataaccccgtagacagtttttgcaatgtagataagagtgaaaattgtgagggaaatagtacaaagaaagatggtgggtaaatggaatcagttaataactccagattttctcctcgttcagcttgacaaagtcaccaaatcctccatctgcataactccatcagtaaacactgcatttaatctcctgggacaaccaatactttttctgtatttttctccctgcctcaccctctttacctatctatgatatttcttaaaatagatgttttcaccaactgcaccctgggatctgatactaagctaggctgtcagtaaatgatattgtcaccacagaaaccaagtatatgtctactctttgtcgtgcccaaatacaaatctgtaaattcccttaatatgtgggttggggtcatcttaatcatcacctttttctcaatcctgtttcagagcctgacacatgataggtgcataatacttaaatgtatgaaggaataaaaggcatgaatgcatacataagttaattaataatcagaagtgagtacatggaagaatcagtactgccagtttaaacacacagaaactgtgcttcaaagacgctgcactatttgccagtagacaaaatgtggaaccaaggttcaaactggaattttctgagataaagtcacaatcatattacagagcttggtcttgggctgtttgcttgggctatttgttttctttttcatttattcatcctatattttcttaaatctctacaacgttttaagcactttgccaaattagtataaaacagtaaaaatagtaagataataaacatggtcttcataatcatggatgtcacggtaaaatgaatcagcctgacagtaagtaagccagcaaatgaaacatagcacagtagtaatacaatgtgatagcataatactgtaataccttttttttttttttccttttcttgagatggagtctctatctgttgcctaggctggagtgcagtgccgtgatctcggctcactgcaacctctgcctcccaggttcaagcgattctcctgcctcaacctcccgggtagctgggattacaggcatgtgccaccatgccctgctaatttttgtatttttcatagagatggggtttcatcatgttggccaggctggtctcaaactcctgacctcaggtgatctgcccaccttggcctcccaaagtactgggattacaggtgtgagccatcacacctggcctataatatcttgataatactgctactaccacatcacctaagatgcttcaagggagtttcatacagttttgatggttttaatgccatatgatttaaactataatctatgatgagtacacattcacattttatagcacagggtcactcaatgctagaggttttatgtagagctcctgaaatgatgcatctgagtcctttcagctgggaaagacatggtctgaataggtaatatcatggttagaaaaacccaattgggtttcacatgtgagtaccaaacctatatttcctctcaaatagaggtactggcttataattgaggtgcttcccacatgggcttgtcaacattgggtgcctctgtgttgagggtgcagccaggatttataaaactgaagactgaatattctctggggcaataccaggcagattctcttgtatatgacattgtagcttagaacaagattttctaatctgcttactttactgaatcacattttaagtttgtttctaaaacaaagatattgagggcagtcagaaaagtagtccacatggacattcttttttttttttttttgagacggagtctcactctgttatgcaggctggagtgcagtggcgcaatctcggctcactgcaacctccgccttctgggttcaagcgattctcctgcctcagcccaccaagtagctgtgccaccacacccggctaatttttttgtatttttagtagaaatggggttttaccatgctagccaggatggtctcgatctcctgacctcgtgatctgcacacctcggcctcccaaagtgctgggattacaggcgtgagcaccatgcctggtggacattccattattaactcaccttggccttggaattaatgacttggagaagacctgaatggggaggggagagcagtagaagcatgagcctttctgactgtctacatgttcttgcccagttttaacttctagtcatggcgaatgatcgcaggagagcacagactggaccctgctacgatctctcttggagtggatcagactgatgatcaccaacaaccaactcattcccggataaggaagaagagagtgtcacctacttcagtgtggtttcaaccctacttctgcatcttaaagacactgtatggtttcagcagtagtgcccctgttcattagtccccctgatgttttcattcctcatctcatctttttcttagcagcattcaatgaatccttcattctagaaacactctatatctttggttttcatgagaccattctcaccttgttttgtcctgtgacttttttgaaaaaaacaaaaacaaaaaaccctttttttctttttaaattctggtaaaaaacacaatgaaaatttgctatcttaaccatgttgaaatgtgcagttagtaaagtacattcacattgtggtgcaagccatcactaccatccatcactagaacccttttcatcttgcagatctgaaactctacccattaaacgacttcccatcttcccatccccacagctcctagcaaccaacattctactttctctatcagtttgactactctaggtacctcatatgagtagaatcatacagcatttatccttctctgcctggcttatttcacttgtataatgtcctcaaggttcattcatgttgtagcatgcatcagaacttcctccccttttaaaggctggataatatttcatggtatgtttagatcacattctgtttatccattcatccatcagtgaacacttgtgctccttccaactttgggctgttgggtgtcctgccactgttgctcctagtgctcaatctcgtttattccctcctaatcaagtgtacaacgttggacactgtgcaggatgatgccacttcatcttggatgctaatctgccatgttgacttctgattaaccccaggcccaggaatgcctcaagatttctactttacttactgttgcttgtgtaagccaagacaaccttgatgttatcataaacatgtacttacctaagtcctgtcctttggcaaattatgggctatgagacacagcattcttgcctttccctgaggggtcaatttcagcgatcctacacattccttctgaagcacttatgctctttctatatggtatgtaagctctcggtctggggagtaacagtgcagagatctacctgtcttgttgccacatgtttctaaactttccaataaatcaccttctactgacaaactggatttgtcttccttattctttggtttcttggttcctttttggtatggatttgctttccctatgtggttctttcatgaaactgttggtgagctagccaggaggaattcaggagccaaagtatgggcaagggaaggaagcctcagttggggaagtcttggggcagccctctgtgtgtgtggggtgatattgcccgtttgctggatgcctgcagaccaccgcctgagtacggggatggcccagaacactacagggtctagagtgcttgtgagaagaaaaccacaccatgcactgaaggtccctgaaggtggcaacagaggggtggccgctattatgggttgcacatgtgaccccagaagtacagttagcaaccgagacaaaggtacagaagctagagaagtaattacagttagagaaggatatgaggatctccacatctgtgttagcatctaatttggtgcataagcttgaaactcaggaggtgcaggtggaaactgttgtctgccgcttttatgcagctgcgaggacaaaaactgcactggttgcaagtgtgagctgtccttgctagaccagaccaagatgctgagacctggaatccttgggaatcgacttgtgagtcagatgaagacagaggttatctcagagtaggaggattgtcctccccttttgagggcaggaggaaaacaaaacccaacagatacagctgtacaatagcaagcagtcttttcacagcaaagcttaactctgagagtacacctcagcagaactattggacacagcaagaactcttaaagcagctgccaagagacagcatagccacatggatggtggtgtggctatgcgagaggcccagtgaaggggacttcccaggtcagacactggcatggtggtctctggaggaggcacagagcaattcaggggagctgggtatgcagcaggccatctatgaccagcagttgcagttgtccccttgtaggacaagatgtatattatgtgcgggatgccgtagctggtcttggagaaactgaaaggggaagggataaggtccaactggttaccaagggaaaagaaaaggagatagcaagtctgttggacttgaaaaaggaggtctaaaagacccagttaggattaccagaaaacaaatgtggtacaatctgatctcagctgggataaaccaagaaacggaatcagcaacctcatgccatgttggtgggcatttgaaaggacttaactcccgcccaactgtttagaccttttcccagcatccggccagaaaaggaggatggaggagatgaaactatgtattaaaaaagaactccggtctctgctccagccttggactcctatccagcctacagactgcggggcggggggcgggggtgggagggggcggaaggggggcaaggttgcctctagggatgagcagtagagggtgactagaggctccatgtggagctcacaatatcagagttgaaaaacacatgcagaggacactagttgtagtggacacaggtgcagagtgcaccttagttcttggaagcccagagagacacgctggtaagtggacagctctagatggttactggggacaaacaatccaagtggaacaaactcctccccttcttggtattggatggtggagtttccctgcttactatactgtctttatctcacctattccagaaaacatgttggatatggacatcctttaaggatgcactttgcaaacgtccatgggggaattccaccaatgagtttgggtggtaaacactatttaaagagtggcagtgaaataggcacctgtactttttcctcccccatgatgtatcatcagtgtgaagtaacaaattattttcttggcagaataaaagaaatgacagccaccatagaggaactagccaaagttaatattagtcggccagcccagagtcccttcaggagttctgtgtgactgggaaaggaaatctgacagcaccgggcacgtgacagtagactacagggaattcaataaggtatttgctgacatataccctgttgtgcctaatatcatctaagtgatagaacaactatacaaactataggtacttatcatctgtattagatttagccaatgccttttttttttttcttgagaaaaggtcttgctctgtcactcaggctggagtgcagtagcaccatcatagctcactgcagccttgacctcctgggctcaagcgatccttcagctgcagcctcctgagtagctgggactactcaggaggtgtgccatcaaggtgcgccaccaagcccagctaacttttcttattttctgcagagatgagaaaataaagagaccaggctgatcttaaactcttgacctcaagtgatcctcccacctcagcctcctaaagtgctgagattacaggcacatactagatttgtctacctcattctttggtttcttgactcctgtgttggggaatgctttgcatatacagccctttcacaaaagagaccccacaaaacaattgatctcattctgtacatccagctaaaatcacatgtgtactagctgataaggcagaacaaaagtaattaagaggttttatttacttaaatatatagtgagtcaaagaaatgtggatgagcattgatttgaaggctatttatagatcatgaaggtaagcctggtgttcacccatgttgagggtgtatcttccccactcagtccactgatttataagccaatctcctctggtaataccctgaagacacagccagaagtaatgtttaccagttacatacatattccttaatccattcaagttaatacctgaaattaaccatcacatcaacccatgttctatggtacaaagcactgtggatgcattatctgtttacacaaggaaactataggctcaaacaggcttaatcagtttctaaactgaccctttaatttagtgggatatgttgaatcaaggacatagtgatgcatgctacaatctagatgcgccttgaagacattatgctaagtaaaaaaaaaaaaaaatcagacacaaaacaccacatattgtgatctcatttgtatgaaatgtcccgagtaggcaaatagataaacagaggaattagattggtggttgccaaggactggcgagagaagagaataaaaagtaatggctagtgggtaggatttctttagtcgttaaagtattctcaactattgtggtggctgttgcataactctgattataacaaggccactgaattttatactgtgaaaaataggctaggcgcggtggctcacgcctgtaatcccagcactttgcgaggccgagatgagcagaccacgaagtcaggagattgaggccaccatggctaacacagtgaaactctgtctctactaaaaatacaaaaaaattagctgggcgtggtggcacactcctgtagtcccagctacttaggaggctgaggcaggagaatggcttgaacccgggaggcagaggttgcagtgagccaagatcgtgccactgcactccagcctgggcgacagagcgcgactacatctcaaaaaataataataataataaagtaaaataaaataaataaaaaatagccgggcacagtggctcacacctgtaatcccagcactttgggaggccgaggcaggtggatcacgagatcaagagatagaccgtcctggccaacatggtgaaaccccatctctactaaaaatacaaaaattagccaggtgtggtggcaggtgcctgtagtcccagctactagggaggctgaggcaggagaattgcttaaactggggaggcggaggtttcagggagctgagattgtgccactgcactccagcctgggcgacagagggagactctgtctcaaaaaaaaaaaaaaaaaaaaaaaaaaaagaactagacttttatgctatgctatgaggactaagctctgatatttttatgttgcccaaattcctacctaaggggtctaaggagtcatgccctacaaactataaattctcatcagatgggttttgtctggccctacgcatcacgagttacttttcagtataactctggcataacattatgagaccaggaaaaaaatatttaaccccaaaatatatttccttgccataccttgaaactgccctgctaagtctcttttgggaaaaatccacatcctatagagaatctcctttcccccttgttttccttcatttctttccagatccaggagataatcaactaagagccaggtacccttttgggcttgataagaaacattttacaacctgctctctctctcaagtctgctgagaacttcctctgcacaataaaatttggcctccacaatcctttatgttatcctgaacattcctttctattgatcccaggtgttcagataaactcaaccaattgtcaaccagaaaatgtttaaatttacctatagcctggaagccaccactctgaattgtcctgcctttctgaacctaaacaatgtatttcctaaatgtatttgattgatgtctcatgcatccctaaaaatctatgaaaccaagctgtacctcaaccaccttgggcacatgttctcaagacttcctgagggcggtgtcacgggccatggtcactcatatttggctcagaataaatctcttaaaatattttacagagtttgactcttcgtcaacaataatctggcgcccaaacgtggggcctcagagaagactcaggacccctaaggagttgcctgaaaccggagctaaggtaccagcaggggcccattgaagtcccactgagttcaagcttctcctccggtggaactggtaagtcctcctgagccccagacctctccttgaccagacttttcttaggcttccctgagccctcttcttgagtaggcctggaccttggatttctgtgtccatccttgctgcacccagttttagcaagaatcctgttaagtaggtttagtgagaattcccttatccttgatcaggttcctcatcttccacccttaatgtctaagtccttggcctgcctttagcaggattctacccttaatacctaatcaagttcctgtttgtgatttcccacccattgacccccttactcttatagttggctacaaaaccaactgttgttgctatattggggagttgagttcactgtctctcccccattgcaattgtcttgaacagtattacttaccgtttacacacgtgtattcttttcctgtttccctcatttgcatgagaaatggaattctgcctttacagccttgatacagagcagtgggtgttgtgtgagatacagtattgaagatgagtctcacctctgtctgtgatgaaatagattgtgaattgtgaagagaatgcaggtagcaatgtaggagctaaacttaagtgtcctctaatttagagtcaatgactttgtcgtttctgctgtgaatctggctactctctgctatgccagaaaatgatgtacttaactgcagcaaacacgtatctttagtttatcctccactcacacaaacctttgggacagcacatgttatcaggagttttccccctcacatctgtactctcttcagatgaatgtggctggagggtcatgtcccgaggaatcttattacttagatattattgatttttgcagagtggggcatctgacgtatgcacaccagtgcctcttctcttgacatttttgctctttgtatcaacagtgaacttgtttctctctgtatatctggacaataaaattgaattcctcatactcagaaatggtcaggtcacattcaggtcatgtgggcacaaaataatagaaacttacactgagacctagaaaatgaaacattcaagcagaaaactgcagagatttagggacttctgtttgattccacaattgcagctattcctgaaaaaggtggagctcaattcctacattggattcattgaaaaagcacagtgttttctgtttcccttttgcttgaattccttgtcatgtctaatgttgtctgcaactcagggtttggaataatccaataggagctctgattgtggacatgatctaacgttctaataaccaagtgatgtgttcaacctgatatagataataaactccaagaccttcaaaaaccaaaaggaagacttttttttcatcttacactgaagataccacattatttttatgcatggaaggggtctcagcactatttcaatgaatacagtcccaatccccatttgaaaaataagaaaactgaggctcatagaagttatgtcatctttctgccgaaaaacagctattaaaaagttggatagtcactgtttgaatgcagacacttggagctctgaaaggagagcatttatgcaggaacatgcaagatcatggaccttggggccatgccatgctgctataccaaaattgaagtagttaaaaatatggatactccatgggttcataggggaacctcgcaagatgctggagacttggataagctgacaaaactagaacacgttttaaatttgggggcgggagcattacagcctttaaaatatcttttataaaaattccactcccaaaatctgagagtacttgtcagaaacagtatttttttaaactcggaatacaggttaaaatccaagctccttaattctgtatttaaggctgtccatgatatcgaccatgcagacgttagtagcttcatgtcttgaccacacctgactcccaaccctgactccaagctgtgccagctctgctctccctgtgcagtcttctgggttgtcctctgtcttggttcattggtagaatagtcacaaactttgttccataccttaatctttttaagttaacaggggatcctagaggccactctgcagtggtgtggcagtattccttattcttgttgtaagttgggtgctgttccaggatattgtcggtgggaattttggttcttttttgctattacaaataagaaacatttgaatagttttgtaaatctacctttttcgtggttttgcttgtatacttttttcactggagaagggggaattctgcatgaaaatgtaaattttaagtgttagaatgtgaggatttgcaaacttatcttacacagacttgtgtcattttccttctaaccgccaacatatgagcatacctgtctacccagggtctctccactagagtgatctgaataatttgaatgctagctgtgtggtaggaaggagcctccccaccgctctcaacaccaaagatgtccatgtcttaatctcaaaatctgttcatttgttacttttcatggcaaaaatgactttgccaatgtgattaaaggatcttcaaacagggagagcaccatggactattcaggtgaaggcactgtaatcacatgggtcattataggagggaggctgaagtgtaagaagcaaaggagacctgatgacaagagagatgcagccttgtgacaagaaatgagggcagcctgtagaacaggagtccccaacccctgggccgcagaccggtaccagtctgtgacctgttagaaactaggccacacagaaggagttgagcagcgagcaaacgtcaccgcctgagctctgcttcctgtgagatgagtggcagcatattctcaccggagcgtgaaccctattgtgaactgcgcatgtgagggatctaggttgaacgcttcttatgagaatctaactaatgcttgatgacctgaagtggaacagtttcaccttgaaaccattgccccatccatcttccagaaatcccatccctggtgccaaaatggttgaggaccactgctcttgaagccagcaaaggcaagaagtagattctctcctggagcctcaggaatggcaggcagctaggcccagacattaattttagctcataaagtatattttggaattctgaactacacaacataatttttttgttttgttttgctttaactgctatgtttatggtaatttgttacagcggagataaaaaaatgaatacacttctcagtatgataggtaagaaatggtatctcagtgtagtgtgaattacactcctcttattttgaatgtcataagttatcttttttaatgttcatagtacttagaataatttgtatggacaaagcacgttgactgagcttctgttgctaactggaggtatcggatatttaacaacacttagaagtttggatggcaacattcatttaaactgtgagacagtaatacctgttgaggtgcagaaactccactaccccttcaagaatcctttttttttttttgagacagagttttgctcttgctgcccaggctggagttcagtggcgtgatctcggctcaccacaacctccgcctcccagattcaagcgattctcccgcctcagcctcccatagctgggattacaggcatgagccaccacgcccggctaattttgtatttttagtagagacagggtttctccatgttggtcaggctggtctcgaactcccgacctcaggtgatcctcctgcctcagcctcccaaagtgctgggattacaggcgtgagccactgcacctggaagaatccattttttttttgagacagggtcttgctctgttgcctgggctggagtgcagtggtgtgactatggctcactgcagccttgaattcctgggctctagcaatcctcccacttcagccacctgagcagctgggactacaggcatgggccagcatgtccagctaatttttttgatttttagaagagacgaggtcttaccattttgcccaggccagtctcaaactcctgagctgaagcagtcctcccagctcgacctcccgaagtgctaggattacaggtgtgagccactgcacctggccaagaacccatatttagagtcagactcaccatatccttgaagaaaccattccaaatattatttaaatgactccgtatttttgaccatcctcattctccagaaataataaccaaaagtaactatatctctgggatttctcactaggtaaacaatcttaaatgaaaaagagagataataagaataaatgtatccattcttcttgcttcaagattcttgcaaaaggcaaaaaacatcaaactcccattaaagttttggctatagcttgtccttctttaattcattcatttaacaaaatgtattgataacccactatgtgcttgacatctacttagacactgtagaaggaacagaggacaagatacgggtcatttctgccctgaagaacattataatataaggcagggaagaggctaactaatgtttggacaatcaaatgatgttactacacttgggcaccactgtttaagaatccctgggctgtaaatcaggaactgtgagtttgttgggattctgccagagactctgactcagtgctactccaggaattttatctttcagacctctctttctttttgtaggaattcctactctatcccatataagcaaatctcagggactaagcaagtagatgttagcagtcaaccatatgtaagattcttttataaaattcaacatgatggcgtgaataaactcactatgctaccactggttgtgaaacctgaagagattaaacaaactttgcattttctcaaaacaaacaaaaaagagtttgttagaattaataaagctgaccccaagctaggataagttggatccagtgtcatacaaggccatttccaattctaaacaaataacgttgaccacatggagcctgtggggaaaactggtcaactctcacctgaagttccaaaagttgagaatatcatattctgtcccagaaattaatttgtaatccaaattcacctggtcaccaacactgttgttaaatttgatattcttcagaaaggagttaagcttaaaaatagtgcactgttacaggatggaaagagttctgaatttggaaagaagaaacttgaattagagtaatacctttgaaacttattagatgtgtggctttggaaaaagtcccttattgtttaaatcttcaactgtaaagttagttattcaattttatttttacaagaattatgtgagataatacctttgatggcccatgaacaaaaatgtggtatatataaagtaaaaattagataaagaaaacattatatatgtaatgtaatgataatttaatatatagtatgataatggaaataccccttacttccttggtgggatgaatgaggacagaagaatcaaaataatctcttgttattggttgaattttgtctgccccaaattttgcatgttgaagtcctaactcccagtacctcagaatgtgactgtatttggatataggatttttacagagttaattaagttgaaatgaggtcgttagggtgggtcctaatgcaatctgactagtctcaccatgtctccatgggttttctctgggtactccagattcctcccacatcccaaagatgtgcacagtaagttaactggtatgtctaagttgtcccagtctgagtgagtgtgggtgtgtagtaggctacacaatctaggtttgtgtaagtacactctatgatgtttgcacaacaaggttcttaggaaattgcctaagaacccatttctcagaatgtatctccatcctttagcgatgtagactgtatttccatactgtaaatagtccccttgtggtggatttcaatctaccaatatgacatcactgaatgtggagttagaaagaaaggtacagttcatggctctcagttcctacagctcttttaatttcctaaatgactgcagcaataaagtatcttttgttaaaatatctggccttttgttcctggttcctgaaaaagctccagaacagctccagagccataaaggtgaaagacagtatttcaaccacacatgagtttatgttaatgaggtgatttttggaaactctcaagataatcccaatatttggggggagtggtggctagttgccagaggaaccagccatgtgctcagaggactggaactcacagctccaccctctacttctgggaaaagagagagcctgaaaattaagttgatcgccagtggccaatgatttaatcaatcacatctacataatgaaaccttgaaaaccgaaaaggcctgagttcaagcggcttccaagaaggtagacaaaaacacatcctcgtgctgggagggtggtgcaccccaactccacgggcacagaagttcctgcactagggattctctcggaccttgccctacatgtctcttcatctggctatttgtatcctttaaaatatcttttataataaaccagtaaacataagtgtttccttgagttctgtgagctgctctagcaaactaatggaacccaaggagccggctgtgggagccccaatttatagcacatctctctgaaacacaggtacaacaatctggagtttggaattggcatgggaagtgggggacagtcttttgggactgagctgtctaacctgtaggatctgatgttttccaggtagcgtcagaattgaattggagtagcggtcacctggctggtgtctgctgcagacaggtttttttgacatgttaagacattataagagacaatagaaaaaatgtatacgatacaaccttctctgagttatatttctccatagccctttttactgttcatcagactgtttatctaactcatgaatttgtggcttgtctctctccgcttcaaagtaaattacataataagaggacagggatttttttttctctgctgtatccccctgaattgcttttccttatttgtctcaccttccaatactaattctacagttctcctagtcagggctagtcccctaaaacggggaccatttccattttgttaaggggctgaacgcggttcaagcctagcagattggttccaaaaacgtcgtgttattcactgcctctgatcagtgacattcccatttgcagctgaaagaggtattaattcgccagagtcacaacacggtcggggttcctcgtcgctgtcttattccaaaataagcttaacacagaaagataatgacactcccacggactggcacagaaggccgcgctccgaatgacatcgcgatcacagaggcacagacagcgtcacaaagccccacgcgtactcacaccgaaggctcagccgtcgcgcgtttccctcccaggccccaggaactagtaactagggacgcttctggtctctaggcgaggagagggggagagcgcaatctttgcgcctgcgcacactcctgctcttacccgccggaaccctgggccacgcccggctcgcgtaatcacgcactgcgcaggcaccgcccgctctgctctaaggtccctctcactccttcagcagcccgaggacaatcccctcaacactaggccacgccttgtctccgcccctctcgtccgacccctggagagaggctggcgcctgcgcgatggggggttccagcgtcgactcacggagtccttcggatgagagcgtctgggtgccagacgaggccgggggtttgttttgggtggtttgggagtccgagctcgagggctgggccaggaagggcaggcgaggcgggcggctccgacgcgggtcgcgaaggcccagccgcgtcctctgtccccaggacgactacatttcccagaggccagcggggcgcgcgtactcgagtctgcggggcggaggccgcggctcggggctgctgggcgttcggggcggcttggggcggcgggaccactggagtgagctgtgggagagatgggggtgtgcctgtgtgtaaaagatctgtcagagtgtgaggctccgtgagagggtgtggtttctgtgtgtgtgtgtgtgtgtgtgtgacagaccgagagtccagtgtgagaccagggtatgttcgtgtgtgacagagcgagacgggccagtgtgagagaccagtgagtgtgagagagatagggatgtgcctgcatttgaaagagagcgtgtgaagctcagtgagaggttgcgaggtgtgtgggtgtgtaagtgtgtaacagaccaggtgtccagagcgtgagaccaggatgtattcgtgtgagagagtgagacgggctggatggagtgtgagagaccagtgagtgtgagagatgggcgtgtgcctgtgtgtgaaaggccggtcggtcggtgggtgaggctcaatgagaggccggtgtgtgttcgagagagagaagaatcaccatgtatgcgagactagactgtgcaagaacagagtgtgagactgtggtatgttaatgtgtgaaagggagaccagtgagtgtgagaaatgggtgttttgggtgaaagacccgtcagtgtgtgaggccgtgttatgtgtgtctgacagactgagagagaccagagtgtgagaccagggtgtgttcgtgtgtgagagacaacatagcgtgagaccagtgagtgtgagagagatgagcacgtggctgtgtgtgaaagaccagtcattatgtgaggctccttgagaggctggtgtgtgtgtatgagagagagaaagagactaaactgtgagagtccaaagagtgagactaggttatgttgttatgagtttgtgagagagagggaggcgatcaaagtataggacaaagttatgtttcctggcttacgacttctaagatccttggaatctccaaagtattaagtgtctttttgcatgctaatgattggtgggctggcagcctgtaggttgatcacggtaagggatggtcacaagaacaatctaggcaggattagagggttgggattacctgccccatccctcaatctccagggaaaggaaagggagccacaggttaaactgatcatcagtggtcagtgatttaaccagtcatgcctacattatgaagcttccataaaaacccaaaaggactgggttcatcaaacttccagatagctgaacactggaggttcctgtaggatgagccccttcctatataaccttgtcctatgcatttcttcacctgcatcctttgtaatatcctttattactacaaacgtgtttccctaagttctgtgagctgccctagcaaattaattgaacgcaaggagggggtcataggaaccccgatttatagctagtcagaagcacaagtaaaacaacctggggtttgcaactggcattggaagtggggagcaattttgtagggctgagccctcaacctgtgggatcttatgctgtctccaggtagatagtgtcagaattgggttgccctagaggtcacccacctggtattcactgggttgccctagaggtcacccacctggtattcactgaagaacttattgcttgcctggtgtgtgtgtgtgtgtgtgtgtgtgtgtgtgtgtgtgtgtagatccccacacatctggtcttagaactgttttgtgttgtgtgagtggagtaggagaaacagtttgtttttcctctttgtcacctgagtgtgttatcagggactggattgtgagaatccagagtgtgagaccagggtatatcaatgtgtgagagaaatagatgtgcctgtgtgaaagatgaacaagtatgaggctccctggagtctgagaaagatcatgtgtgtgtctgagtaaaagcaagagactagactgagagttcagtgattgggagagactggggtatgttggtgtgagtgtgtgagagaccaatgggtatgtgagagactagagtatgtctctgtctggactggtaggttgtgagagggtgtatcacagtatgaaaaagattggagtgagagtgaccagtatgtattttgtgtgcatgagataaagcagttggaatatgagagatcagagtgtgtttgtgtatctgtgtgagacactggagcatttgagtaactgaggcctctttgaaagataccattgaatgtgtatgtatgagagaccatcatgtttatatgtgtgaaagagggagagaaagactagtgatgtggttgtgtgagagaccaaaatgggtgagaaagaaactatgtgaaccatggtgtgttatccaaaaggctttacaaatataacctctgtgaggttgtgaagcatgcatgtgtgagtgagacagagataagggacagtgagctgtgtgtgtgagagaagtaagattgggggtatgtgtgaaggtgttggtgaatcaccacgtgtgcttatattcatgtcctcaggcaatggaaatgtgactgtgtatatgtgcttgttttggggtgcttgtgattgtgtcctccgtgtgaccatgaaacctgtgttagtgtttgtatgtcaccctgtatacccataattgtggccctgtatgactgctgtgtatggagagactacttggaagattgataggattggattctttatgagtgtggctgtttggaattgtgtgttgccgggataggaaatgtggaatagaattcctgtccccagtccaagggtttcagtaagaagcaaagctggggtgactgaagctcctaactgaagcaggagacaccctcacttctgtgtgacaggagggtaattaaggggctgggacagaggtgagagtgaaagtggcagaattgagtgctaaaggttccatcgtttcagggtgaggaaagtgaaacagtgccggggggtgggtcagggatgcagtggtggggattgagtgaagaaggaggataaccctggcctctggtggcatttgggagtcagattttcctttttcttttgtttttttttttttcccaaaaaccccatccatctggcccagaaaggagccagattttcaaacagtagactttcaaagcatgaagcagagacccaagaagagaatgactccacctttacctgtaaaatggaggaaatgactattttataggattatttgaaaaataaagtgagataatctaatctatgcagagtacctaatgcatctgaatgggaaggtagctctttgaaaaagattaaatttaggacctcaagcatgaaaaaaaaaaaccgttatgagttttagcccttcagtggccataggttgctcatacccagttatgggatcaaccaaagctgggaagaagaagacagttttaggctagtgattctgggagtgcagcatctctggcctcatctctctctaacctttcccttccttcagccttgccctcccaagacactgttcttcaagagaaagaccagaagagaaggcaaaaatgaatgttgaagtagtaaaagtcatgccccaggttagtggatattttctttctcttcatgaaaggcagtcttgctgtttaggactttttgtaatgcttcttttcttttgaaaattccctgattaacagtccaggagcctagttcccacttctctcaggggccactgtctttaactctaattacctaatgagtgagtaatagcttagtataaaaagtcatggaggtccctctgagattcctcttcccaccttgtgtacattttaaatttagtgttgactcttgtgaaaagacttgatttatgttgtgtggaatatacatgtggatatgttagtactagtgagttgggctccaggttaaatgtgcatgcagtgcgtttcctatatatagaatgcattaggaattattcctctacctgaagttttctccaaatctctaattatgtccttaagataaattctttaaaagtttttctttacattttaagtatgaattaccaacctcattcgttcacctgaaaaatcttattctacttaatttttgcaaattttataaatttaaataggtgagaagttgacatggtacaaaatttacaaacaaatttcacccttaactcccagttattttaagaagttattctcaccatgtatctcattcagagctatgttatgcctttgcgtgtatacaaaaatactttcttcccttcaaagttaatgatttttcgtgtcttgttgatgaaatttttgtctacctttaggtcctatttttcttctaagatttgttttatccttcacagttaagtttctggtaagcttagacttgatttttgtggttttctatcatggtagggctgaaattacattaactttttatgttaaatttaatttacattagatttttacatttaatttacattacatttttacattacatgtataatttataataagtgaggcagagatttattttttcaagttggcacaatggcattaattgaattattcatctcattctcactaatttgaaatgccacctatatcatgcactaaattcctgtgtgtatttggttctgttgctgtactacactcagttttacttgaatttctgcttttaatcttttaatttttaaatattatattgcacatgtataagaaacaatgtataaaaaggaatccttaattctcccactgtgaaattcccctcctcacattttttctaagtggaaaatgtgttttcatgacatacatgagtgtcagatgtccataattaatgcttaattaatttatatgcttcatatggaaagttacgttaaattaattttgaaacactgcttttttttcttgtgctgtcagagttcatgagatattaaaaaacatttacatggattctgggcatctgtgtcttcctcagcattaaaaccattttgtgagttacctaacataattttccaaagatacagaccttttagtttgtgtgcctcatgttgtcattaaaattctacctgaagtcacaagcaccatacacaacagaattagtcccctccaatttgccctatagaagtaagttgggatctccacaatacaacttactgtctttagttttgatatttaacctcatactcctgaataatgttccatacactatttcttgattattttagttttagaaatgatccagtaacctactactatagatgataaagatgcagtccattaaccccaccacctgaaatgcacacacacatgcttatttgatagactgtaaacattattcactatttttgttttaagtcagtgttcagcgtagcttggtgtctttcatcaatttggaaatttttcaaccacaaatattctgaaactttcctctttttctaagatcacaattatatacataactgacactgttttatatgtcacttatgctttaattctctctttaattctctaatctcctgttaagcccataatggaattcttaacttctgttattgcatacttagttctagaatttctatttaattgttttatgtaattttctattttcttcctgaattcactacctttccttttagctccttaaaaatattatcataatattttggtatccttgttggataattccattatctggatctcttatgtgtttctattttgtgatgttttgaaaattatcttgttttttgtcttaaatgcctcattttgggtttagtgctagactttatatatttttaaaagatagtttgaagctttgatgtcctcctcttgagaaggtctacttaaaaaataaattttattttttagaatagttttagatttgtagaaaaattgcagagatagtgtagagaaatcttataccacaccaagcttcccctattaatattttacattagtgtggtacttttgttaaaattaatgaaccaatattgatatgttattagtaactaaagtccgtgcttagtttagattttctttcattgttttaactttttaattttttttttttttttttttttgagacagagtttcactctgtcacccaggctggagtgcagtggcaggatcatagcacactataacctgcctctccagttcaagcaattctcgtgcctcggccactcgagtagctgggattataggcatgcaccaccatgcacagccaatttttgtatttttggtagaggtggggttttgccatgttgtccttgccatgctatgtaggctggtcttgagctcctggcctcaagtgatctaccggccttggcctcccaaagtgctgggattataagtgtaagccactgcacccggccaggctttcttaggttttatctaatgttttttttctgtgccaggattctatctaggaaattacattacatttaatagtcatatttcctaagactcctcttagctgtgatagtttttcatactttgcttatcgatgaccttgtcagctttgaggaatactcagttattttgtagaatgtctcaaatctgatgctttttcatgattagactagggtactgtgttttggggaggaagactgcagaggtaaagttcctttttcatcacatcaaatcaggggtgcacactgtaaacatgatttattactgttgatgttaatagatgttaacttaattaactttgaggtagtgtttgtcaggtttctctataataaggttactcttttttccctcacttttccatactgtactgtttgtaaggaagtcactatgcacaacctacactccagaagtgggaaattatgttctacctccttaagggcaaacataaatcatttgaaagatcttctaaatgagatatttgcctattttcctcatttatttatttagtcttaatttagtcacttactcagtattaatcctcctggaaatttcataaattatctgataccttgcaataaatggttgtgtccttaaaaagaaaaaagaattacaagctcttcagatgctatccattgggatttacttcattggttatagcattatcagttaaaaaaaatcactacatatacatgcatacatatatgtaaagttattctatagatattggtaaaattctggtagtatatatactagattactaaccataagtaccaggatcaaaagcagttttttctgtgggaacagccaaagctcctctgtccttaatagtcagcaaaattatcctaaatattggaaagaatgtgaacaccttttgcttgcattgaggaatacatctcattttataagaatatgtgaaatgatggttcttagttctcaactcactagaaggtgaaaactagaattcagtaaaactgtgagtacacagagaaatgtaaacaattttgtaattcttttatatgaaaaatatattaaacattttcctaaaggtatgtatatcttctaaagtcccgtacattgaatatctgtttaaaatgtgcttttaaacactaatcttcagaacaaagacatgatacagagattactgtttaaagcgaattaaaatgtgctcataaccttgtctttagttatatttttgataactttgcaaatcaggcactaagattaagaagatattcattttcaacggaagtaaatctgaaggtgaaaaatgcccacaataacttttaaaatttcttacaagctgctggtgattataactggtcattaatttttctctaagaatatttaaaagttataacttcaatttcattttgttctgcaactgtgggttctaccaaccgtgggtggaaaacacagtattcactgatgcagacctaagaaaattgcattcttaaacatgtttttattatttaagaaaaaaaaatcagctacattagttcaatgcctttctccagcccctgccaataaaacttggatcccatggagtatcatttgaaaaatatcagtttagatattccttttatgcttttgaagattcaacacaggtgtgtgttctcccttgaagccgtcttcactgccttgtagttatgcacccatatttccctatgttcggaatcgattggccccattgtacccaatgcagttaaacacttccataagtactgttttggcttggatcttcctatttatgttttttctcttctatgagttatttctcacctaaagtagagacactttggatcaactcagagttatctttggacacgagcattggttggttaagaatatatttgtcacttcaggacttagtgacattcaaggatgtggcaatagatttttcccaggaagaatggcaatggatgaaccctgctcagaagcgtttatacaggagtatgatgttggagaactatcagagcctggtatcacttggtgaggatcttttccctcctgcataatctacctttaaggaacttttttgtctatatattattaaatttgcttttattatatgtaggtcagaatggaatttgggaatggaatctgagaaacagaggatattgagggactgaagaaaacttgagatttagagttagtgaatttggagaatatcaaatattccatgcatacacccttaaggcaattgggaacacaagacacaatgtgaatctcaccagtctcctcagtttccttgttctctctctcctacagaattactatcaccactagacaacaacaaggttcacaaagaatatatagctagattactataaattcagaatatcacttttaaaatctgtatctttgtattaagtaacaaactgaagacacaaactgaaaatggcttcagatcacttactgttagggaaattcctatggacctttcttctaagcactggggccaccccattggctagattagctttctgttctccagaagcccttttgattatgcttgtggttcattgagcttcttgaaactaaatttatatcttaaaccaaatttgggagatttttagccattatttcttcaaatctttttttctgttcttttctgttttggacttcagttacacctatgttagattgtttgatattgtgccctaggtaactaaggattgtttcacttttaaaaatctttgttctgttttaattttaatttttctctcgctctctttttttttttttttttgagacagtcttgctctgttgcccaggctggagggcagtggcgcaatcttggcccaccacctcccaggttcaagcaattctcctgccttagcctcccaagtagctggattacaggcacccaccaccacacccagctaattttttttttttttttttttttgaaacggagtctcgctctgtcgcccaggctggagtgcagtggcaccatctcggctcactgcaagctccgcctcctgggttcacgccattctcctgcctcagcctcctgagtagctgggactacaggtgcctgccaccacacctggctaatttttttgtatttttttagtagagatggggtttcaccatgttagccaggatggtcttgatctcctgacctcgtgatctgcccgcctcagcctcccaaagtgctgggattacaggtgtgagctactgtgcctgacctaatttttgtatttttaatagagacagggtttcactatgttgctcaggttggtcttgaactcctgacctcaggtgatctgcctacctcagcatcccaaagtgctgggattacaggcgtaagccactgtgcccagctcagattggataatttctgttgattcatagtcaaattccctgactctatccttaccctcaatgtttggttaggtgcatctagtgaatttttaagtttcagatgttatatttgttaaattatataatatttatttggttcttcttgtagtttcgtttctgagatatcctgtgtgtacatttatttcaagcatatttgcctttatattcttaagtattgatataataatagctgtttttaaatcatgtgctatttcttcttcgttattgcagtgtgagcgtctattgcttgctttttctaatgggcatgattcactttttccttttcttatgtcaagtaattttgaattttatcatgtatacttaaataaaacattgtagagcctctggattctgtcatattcccctaaagagtattgatttttttctaaagcaggcaattatctcaaaacttcaaactgtttctagggaccttttaaaatacctcatttactactgtgtgataatattcagaaaatgttgggctaaatttctgccctcaagcccctcataaaatagttcacagagttaactgttagcagtcttactaggctattccagagttttatgtagtctgtccttcagatgtgctttatctcttatctagtattcctactatatcattccaccagaattaaggtactggcttttagttctgaaataacccaaaacatgaccaattttcatgtcttttttttatatgtaggtctttgcatttctaagccatatgtgatctccttattggagcaagggagagagccttgggagatgacgagtgagatgacaagaagcccattctcaggtgagtgtggaagaaccagagaggggaatctttttgacataatggctcagccatttttagaggtgataccttctcacttatgcatctcagaaactcttcataagccttacaggcctggagagaaaactgaaactttatgcttcacatgggcccctcaaatatcttctcttccacttgactgtcttctctctaagaactaatattctgtagagattagagaatcttaaatctctaagatttttgttttgcaaaaatcattatccagctccttaccatcccgtctttcgctttgccatacagacttatataaacttctatgtttcttaaatcttttcttaactcttgaattaggtactgcttacaaattataatgtaccctgctgctctttcattcctttcctgtagcagataggaaaaatctaaaccctgttagcctcttcctgatcagctccttcctacttctataacctcattctttattactttttagctttttcattatactttagtccagagtttgctaaattatgtgagatacccagggtatgtttcaagtgagttacaggtataccaagctactgagtctctcaagagccttgggagactagatggctccagaggtaattccaaatctgattgcctctgagtcacaggcagtatcattcttttgcctgctccacctgtgttttacaaatgtcatattagggtcaacttttctgaactcaccaagctttttactgactcaggcatatgcacttcctgtttcctctacccagagtgttcctctcctggggtctgtctatcctgaatatcaaatcagagctaaaaaatcatctcatcagaggccttccctaaccaccttatgtgatgaacatttccccatcccaacccaataactgtccaccaagccactgtttattttctttctaacactcaggaaagcctacaattaacttgcttatgtttaatgcttatattctgcctctcccactgaaattaaagttccaaaagaaaagggcatatcaatatatgcccttacaattatggcttaaagcattctcctttcccttctgtaacagtgtttgatcttttggaataatttggatcctaaatttcccgtgtcctccaaatacaatagtccccctattcaaggttttgccttctgcagtttgttacccacagtccaccactgtccaaaaatattaaatggaaaattccagaagtaaacaatttatatgttttaaattgtgcaccattctgagttgtatgacgaagtcttgcacctttctgttctgtcctgcccagatcatgaatcatccctttgtctagcacatccatgctgtatgccctacctgccttttagtctcttagtctcgtctagcttttcagatctgttgtgtgtagtgaatatagggttcagtatcattccgggtttctggcgtccactgggtcttgaaatgtgtccactgtggataaggagggatgactatacccacacatcagaagggaaatagaccctgcttggatgtactttatactttggttttgtatgaagatgccatctgcctcaaatagagaaacagaaaagaactttcctgataattggccctgtgaagaacaagtggaagaagggaaaaggggaaaaggaagaagctataagtctggtgggatgctgagtcaatgtgtagatataagtattattgtatgcataagatatcttagtgtctgttaaaaaaggccaggaaatgaggaacaaccatggctctctgtaggaaattggagttgaagacaatcttcatgtgacaaaaaagtaaaatgtgagaaaacagtagatgatggactcagcattctgtgtctttttctagtattgttctcttcagtctgtctacgtaggaaaaattataggtgattagttcattaaccccacattgcctcaattcttgaagcatgggtgccctggtctgaatgtttgtgtgcccctgaaattcatgttgaaatcatcttctctagagtgctggtggtaggtggggaccttgggaggtgattaggtcatgagggctcatgagtgggattattacctttataaaaggcccaaaggagcttccttgccccttccactgtgtgaggaaacaggaagaaggcaccatctgtgagaaagccagcccatgccatgggccttgatcttggatttcccagtctgcagatctgtgagaaataaattagccatggccggctaattttttataagtgtattagtctgtttagttataagtgttgtttgtaagtgtattagtctgttctcaagctgctaataaagacatacctgagactgggtagtttataaaggaaagaggtttaattgacttttagtgccacatggctggggagccctgacagtcatggcagaaagcaaaggaggagcaaagtcacttcttacatggtggcagtcaggagagagcttgtgcagggggactcccatttacaaaaccatcagatctcgtgagacttattcactgccagtgaacagtatgggggaaactgcccccatgattgaattatctccacctggccccacccttgacatgtgggtattactacaattcaagatgagatttgtgtggggacacagccaaaccacatcaataagctacccactatgtggtacagtcatgggccacataaacaatgtatctatccattatggactgcatataagacagtcacacaagattatgatggaactgccctatacaggtataactttaaaaaaatctcttctggctaggcgtggtggctcatgcccataatcccagcactttgggaggccgaggcaggcagatcacgaggtcaggagattgagaccatcctggctaacatggtgaaaccccgtctctgttaaaaatacaaaaaaattagctgggcatggtggcatgtgcctgtagtcccagctactcgagaggctgaggcaggagaatggcatgaacccgggaggcagaacttgcagtgagccgagattgcgccactgcactccagcccgggcaacagagcaagactctgtctcaaaaaaaaaaaaaaaaaaaaactcttctattgctgggcatggtagctcacacctataatcgcagcactttgagaggctgaggtgggaggattggttcagcaggagttccagaccagcctgggcaacagcaagacctcatccctactaaaaataaaaaattagctgggcatggtggcatgcacttggtactcccagctactcaggaagctaaggcagaaggatcacttgagcccaggagtttgaggatgcagtgagccatgatcatgccattgtactccagcctgatgacagaggggaccctgtctcaaaaaatatatataaaatgtcctcatagcatattttactgtaccttctttatgtttgtatatgtttagatacaaaaataccattgtgcttcagttgcctatagtattcagtggtaacatgttgtgcaggcttgtagaccaggagcagtaggccatatagcctaagtgtgcagcaggctacaccatccatcaaggtttgtataagtacgctctgtaattgcccatccgtaatgatgcatttctcagagcatttctccatcattaagtgacacaagactattttgttatagcaacccaagttattcaagacactggatattcctgataccatgaagacctggactacaaagcatgttaatacctcaaaacctttcttgactgctctagtggatttgatctctcccatctctgaacttttataacaatttaatctttatctcacacttgattatgttttgtattatcttctcaaaactttttttgttggtcttgtcttcctaaattactttctaaacttttcaagaacaattccttcattactttgatatcacaaatgcttagtgcataatgtataattgcttaggaaatattggattagtcgatgatttgctatggatgacatagaaaaggaaagcccttcctttgccttttcttgaaaccaccttttccctcaggttttctctcagtatcatctcttcaatacaaatttctttatattttactgataactttgtatatatgcccagatttcttctatctatggtaagtgatgtagcaatatattttttctttttttctttttttttttttgagatggagtttcattcttgtcacccaggctggagtgcaatggcacagtcttggctcactgcaacctatgcctcctgggttcaagcaattttcctgctttagcctcccaggtagctgggattacaggcaggtgacaccatgccccgctaattttgtgtttttagtagagacagggttacaccacattggccaggctggtctctaacttctgacctcaggtgacatgcccgccttggcctcccaaagtgctgggattacaggcatgagccattgcacctggccgatgttgcaataatttttaaagcacatttattccttctgtaaacttatattctaggtcaggagttaagaaagttactcgtggtagtaaataagaatgtgattaatagtagttatatcaacctacatatcattataaaattcatttcttcaaaaggggaaatggtaaaaccctgttaagcagtggcttaaggtgctgggtgcagtggctcacacctgtaatcctagctactcaagagaaggtgggaagattgcttaagcccaggagttagtgagccatgatcatgccactgcactccagcccggacaactgagtgaaaccctcttttttttttttttttataaaaaggtggtctaagaggtgataattttaccaggctgttgaaagtaagatgaaagggaaaatctcttaatatgcagattaaagttcagggaactctgagaattggagagtttgctgtattgaaacatgtagatgatttcataggaacaccattttcacattatgaaaagataaccataggatttcacctaaatcctaagataatcacaagccatagggtatatggttactggagatctccagagacttttcagcagcagtagtgatacgatattggtatttaaacaaagttaacataactgtatatgaaaaccaattacaagtggaagagagtagatgaagagagcttaatttatagtctgttaggtcaatacaggcatgaaatattaccattgcagactacttctctaggatttcatcctacattgaggtttttgtttttgttttttgtttttgtttttgttttgagacagggtcttgctctgttgcctaagctggagtgcagtagggcaatcatggctcactgcagtctcaacctcctgggctcaagtgatcctctgacctcagcctcctgagtaactgggaatataggcatgtaccaccatgcttgactaatttttgtgttttttgcagagatggtgttttgccatgttgcccaggctggtcttgaactcctgggctcaagcaatccacctcagcctcctaaagtgctgggattataggcctaaaccactacacctagcccatttcgctttcttagtcacctctcccatgttccttcatgagctgtctttcttggggtctccctgaatgttttccagttgacatgcctgtacataacaggttttgtgagatttattaaatatttttaaattacctttttcacaatgtctcctttgttgtagcccatgataaagggaacattcacttttttttaatatctttcagattgggaatctatatatgtgacacaggaattacctctgaagcagttcatgtatgatgatgcatgcatggagggaattactagctatggacttgagtgttccacttttgaagaaaattggaaatgggaagacctttttgagaagcagatgggaagtcatgagatgtttagcaagaaagaaataatcactcataaagaaaccatcactaaggaaacagaattcaaatatactaaatttgggaaatgtatccatctggaaaacatagaagagagtatttataatcacacatcagataaaaaaagcttctccaaaaattctatggtaataaaacacaagaaagtctatgtaggaaagaagctttttaaatgtaatgaatgtgacaaaaccttcacccatagctcatcccttactgttcattttagaattcatactggtgaaaaaccatatgcatgtgaggaatgtggaaaagccttcaagcaaaggcaacaccttgctcaacatcacagaacacatactggagagaaactctttgaatgtaaagaatgtaggaaagccttcaaacaaagtgaacaccttattcagcatcaaagaattcatactggagaaaaaccatataaatgtaaggaatgcagaaaagccttcagacagcctgcacaccttgctcagcatcagagaattcatactggagagaaaccctatgaatgtaaagaatgtggcaaagccttcagtgatggctcgtcttttgctcgacatcagagatgtcacactggcaaaagaccctatgaatgtattgagtgtgggaaggcttttaggtataacacatcttttattcgtcactggaggagttatcatactggagagaagccttttaattgcattgattgtgggaaagccttcagtgttcacataggacttattctgcataggagaattcatacaggagagaaaccttacaaatgtggtgtgtgtggaaaaaccttcagctcgggttcatcccgtactgtacatcagagaattcatacaggagagaaaccttatgaatgtgatatatgtgggaaagattttagccatcatgcatcactcactcagcatcaaagagtacattctggagagaaaccgtatgaatgcaaggaatgtgggaaagcctttaggcagaatgtacaccttgttagtcatttgagaattcatactggtgaaaaaccctatgaatgtaaagaatgtggaaaagcttttagaatcagttcacagctggctactcatcagagaattcatactggagagaagccttatgaatgtattgaatgtggaaatgctttcaaacagagatcacaccttgcccaacatcagaaaactcatacaggagagaaaccttatgagtgtaatgaatgcgggaaagccttcagccaaacttccaatcttactcaacatcaaagaattcatactggagagaaaccctataaatgtactgaatgtggaaaggcttttagtgatagctcatcctgtgctcagcatcaaagactccacactggccaaaggccctatcagtgttttgaatgtgggaaggcgttcagaagaaagttatccttaatttgtcatcaaagaagtcatactggagaagaaccttaagaatgtagtgcatgtggccaagcctttagttatcaccaatcccctactgttaatcagagatgtcccactggataaaaaacatataaatgtaagaaatgtagaaaaaccttcagccaggaggctggcaagatggccgaataggaacagctctgatctgcagttcccagtgagatcaacgcagaaggtgggtgctttctgtatttccagctgaggtacctggctcatctcattgggactggttagacagtgggtgcagcccacggagggtgagctgaagcagggtggggcgtaacctcacctgggaagtgcaaggagtcggggatctccctcccctagccaagggaagccatgagggactgtgccatgaggaatggtgcactccggcacagatactacgcttttcccatggtcttcgcaacccacagaccaggagatcccccttgggtgcctatgccaccaaggccctgggtttcaagcacaaaactgggcggccattcgggcagacaccgagctagctgtaggagtttttttgatagcccagtggcacctggaatgccagtgaaacagaaccgcttactcccttgttaagggggctgaagccggggagccaagtggttcccatgcccactgagcccagcaagctaagatccactggcttggaattctccctgccagcacagcagtctgaagtcaacctgggatgatcaagcttggtggggggaggggcgccaaccattaccaaagcttgaataggtggttttcccctcacagcgtaaacaaagccatggggaagttccagctgagcagagccctccacagctcagcaaagcctctgtagccagactgcctctctagattcctcctctctgggcagcgcatctttgaaaaaagtgcagataaaaccctcatctccctgggacaaagcacgtgggggaaaggggtggctgtgggcacagcttcagcagacttaaacattcctgcctgccagctctgaagagagcagcagttcttccagcacagcgcttgagctctgctaagggacagactgcctcctcaagtgggtccctgacccccatgcctcctgacggggagacacctcccagcaggggtccacagacacctcatacaggagagctctggctggcatctggtgggtgcccctctgggacaaagcttccagaggaaggaacaggcagcaatctttgctgttctgcagcctccaccggtgatacccaggcagatatggtctggagtggacctccagcaaactccagcagacctgcagccgaggggcctcactgttagaaggaaaactaacaggaatataatcaacatcaacaaaggacatccacacagaaaccccatctgaaggttaccagcatcaaagaccaaaggtagataaattcacgaagatgaggagaaaccagtgcaaaaagcctgaaaattccaaaaaccagaatgcctcttctcctccaaaggatcacaactccttgccggcaagggaacaaaactggatagagaatgagtttgacaaattgacagaagtaggcttcagaaggtgggaaataacaaactcctctgagctaaaggagcatgttctaacccaatgcaaggaagctaagaaccttgaaaaaaggttagaggaattgctaactagaataaccagtttagagaagaacataaatgacctgatggagctgaaaaacacagcatgagaacttcgtgaagcatacagaagaaaaaccttcagccagattgaatgctttacagggaagaattcatactgcagagcggtcttaacaatgtaaagaatgtgcaaatgtcctcagacaagatgcacaccttgctcattagtgagttcatttcaggcagccagctcttcctcacccactacatcaccaagtcctgtggatatatctgctaaatatttttggaatttatccacttcttttggttccccagtccaaaacacagtcatttcacctggactatttcaatcattacacaggtgtccaaccttttgtcttccctgggccacattggaagaagaaaaattgtcttgtgccacacatacaatacactaacattaacaatagctgatgagctaagaaaaaaaaaaagtctgtgcatagttttagtgatacaccacctccgataagcaaaaaagtcctcacattcaatgggttgcatacccatgaattctaaaacttcatcctcttttgtccctttcgagttaacattacagccacagtgacctttcaaaaatgcaaattaagttactcttaaaactctagttaaaatacttgatgtacataaagtgcttagcaaaatgaccaactcatactaagtgcttagtaaatgttagataagtattctccagaattgatgtaaattatttttaaacagtgcattcttgaaagcagtatggcagtcataaaaattttggaaccaaaacagtatctttttttaagctaaaaaaaaagttttaaatggtgtctttctatgttgcccagggtggtctcaaactcctgtgctcaagtgaccctcccacctcattctcaagtggctgcaattacaggcaaccagcctgacttaaaacagtatcttaaggtagatggtgattagcacatgtagtatgcttaacatttaatattataataagacatcacagcggctgtctcatgattaaggctgtgttcccttgttggtgaggaaattaattatgacttgataaatagaacatgttttaagaagtggctatatagctctggataaaacgaacaaaagaattagaattcctgcggggaatatatacaagactttatttagtcaagtaaaaaaaaatcactaatgtttaactgaagaaagagaaattgaataatatagttctatttcaacatgtgggttcacagatttattctaaccttccaagtaaagttgttccactagtaaagttgttctggagtatattttttttaaaaaaaacacttaaaatgttccacttctttcatgaggctaagtcaactctgatatcaaaccaaggggaaagaaatgaaattataggtgagtttacttagttatatacaaaaggaaattattagcctctgctgatggagaacagaggctgtgaataaatggagatccataacatgatcctacatgaatgtttcaatattgtaatcctgtaagttacttttacattgacagttctgaaattcatgttgagtgttaattaggcaggaatcagaagggaggttttgtagaaggtcgtatccatgggttttttatatttgaaaagtgttttcgatgtatcattgggggagattaaatgtctttgacagttgtccaactagaaataaagtcagcatcccatttgactccttacacagaagttcattctatactcattacagatgtaagaggttaagatggtagaggagaatgtagagtatttctgtgcctttaggttcaggaggtctttgataagcaggacaaggtccagaagccatgaagagagaatgacaggactgtgtagaagatttaaacctttttcatggcgtaagatactgtatgcaaagttaaaaggcatatgacaggctgagagatatcttaaacatacattagaaaggatatagcccttgaaaaagggctgttggaaagcagcaaggataaggtgcacagtcttgcagagcatgtcaacaaaatttattggatgaagaaattaaaatggttaaatagaagaagttctcaacctcactaatgatcagataagtgcagattgtaaaagtcctcatccccaccaacacaaaccagcagaaattttatgtgaatgtgaagtttggataatatccagtattgtcgcaggtgtgagaaaccgtattttcaaatattgagagggtaaattagaggaaagccattttagagggcaatgtggtgttacctgtcagcattttgaatataattaccctttgccacaattctacacctagtcagttatgttctcaaaaagcacaagtgcagaaatatagatgcataagcaaatgtgttgcagaattgtgaaaaatttggaaaaaatgtttagtgctattaaagttatgggttacttaagttacagaaaatcagtttagtagatcactgtgtagttacggaaaatgagatggatctctactcaaagatgtcttgcagtttatgaactgagatgtaacttcatgactaacatgatgacatcgttattaactacataaactttataaagcttaaaaaatgcattcatagtatcttatttgttgtttttgtttacaatacaaatagaaaccatgcacacagatacaagaactccttccctgttgtttgtttttgttttgttttgtttttggtagcgggcggggtgagctgctctcatgttattccatgagtttttttatgtgttgcttgttgtgcatggttcattttttgtttttattttttgagacggagtctcgctctgtcaccaggctggagtgcagtggtgcgatctcggctcactgcaacctccacctcccgggttcaagcgattctcctgcctcaccctcctgagtagctgggactacaggatagtctcgatctcttgactcatgatctgcccaccttggcctcccaaagtgctgggattacaggcataagccaccgcttccagcctgtatatggttcatttaaatcaaatgagatactccttgagacatgggggaagttgaatgtgagttatcctttggccaagacttaaagatggtatatgagtttgtctgctgtgctccctagacctgacccgattcatgcttctgccaggttgtaaacctgttttgtcctgctgaattggcagagcagtcccaaaagaactgtaactaaggtatgcacatactgaagaaagggatatagtatttctgggagagccctaaggaaggtagacttctgttgcagtcattctgaagaattatgggtggtgattcttgcacaagcccagctcatacatctaggctagatgatgcttagatatctttatcagtgcctggggatgttttaaggcctctggttgggtttaagcctgctgggagaaacctcggctaaaaacagttgaaaagcttttcctgatcctgtgcttgagagcagcattttacctctagggagtgctttacttgccatccataggatgctaggcacatttcaaagaaggactgttttaggaaagtggtttcttatctcttaaatgtattgaggctcattttatggcctatcatatggtctatcttggagaaagtcccatgcgctgttgaatacaatgtgtattctgtggttgttggatgaaatgttctgtatatatctgttaagtccatttgttccaaggtatagtttaattccattgtttctttgttgactttctttttttaaaagtttgagatggagtttcactcttgtcacccaagctggagtacaatggcatgatctcagctcactgcaacctctgcctcccaggttcaagtgattcttctgcctcaccctcccgaatagctgggattacaggtgcctgccaccacacccagctaatttttgtacttttattagagacagggtttcaccatgttggccaggctggtcttgaactcctcacctcaggtgatctgcctgcctcagcctacccaagtgctaggattacaggcatgagccactgtgccagacctctttgttggctttctgtcttgatgacctatctagtactgtcaatggagtattgaagtcccccactattattgtgttgatctctatctcatttcttaggtctattggtaattgttttgcaaatttgggagctccagtgttaggtgcatatatgtttaggattgtgatattttcctgctggacaaggccttttaccattatataatatccctctgtctcttttaactgctgttgctttaaaatttggtttgtctgatataagagtagttacccctgcttctttttggtgtccatttgcatgaaatgcctttttccaccctttaagtttatgtgaagtccttatgggttaggtgagtgtcataaaggcagcagatagctggttagtgagttcttatccattctacagttctgtgtcttttaagtggagcatttaagccatttacattcaatgttagtattgagatgtgaggtaccagtgcattcatcatgctctttgttgcctgtgtaccttggtttttttttttttggctttttaactttttttttttgtattataggtcctgtgtgatttatgctttaaagaggttctgttttgatatgtttccaggatttgtttcaagatttagagctccttttagcagttcttatagtggtgccttggtagtggtgaattctctcagcatttgtttgtctgcaaaagactgtatctttccttcatatataatgcttagtttcactagatacaaaattcttgggtgataattgttttgtttgaggaggctgaagatagggactcaatcccttctagcttgtagggtttctgctgagaaatctgctgttaatctgataggttttcctttataggttgcttgttggcttctgtatcacagatcttaacattatttcctttgtcttaactttagataacctgatgacaatgtgcctagtgatgatctttttgcagttaatttcccaggtattctttgtgcttcttgtatttggatgtctagatctttagcaaggctagggatgttttccttgattatttccccaaatatattttccaaacttttagatttcttttcttcctcagaaacactgattattcttgggtttggtcatgtaacataatccctgactgcttggaggctttgttcatattttcttattcctttttctgtctttgttggattgggttaatttaagaccttgtcttcaagctctgaatttcttctacttgttcaattctactgctgagactttccagagcattttgcatttctataagtgtccaatgtttcttgcatttttaattttttttctttatgctatctatttccttgaatatttttcccctcaattcttgtatcactttttggatttccttgcattgggcttcacctttctctggtgcctccctgattagcttaataactaacctttttcaggtaaatcagggatttcttcttggtttggatccattgctggtgaactagtgtgattttggggggtgttaaagagccttgttttgtcatattaccagagttggttttctgattccttctcatttggatatgctttgtcatagggaaggtctagggctgaaggctgttgttcagattcttttctaccattctttttctattcccttgacgtagtactctccccacttttcctatggatgtggcttcatgtgagccaaactgcagtgactgttgtctctcttctgggtctagccacccagcaagtctgcctggctctgggctggtactggccattgtctgcacagagtcctgtgatgtgaaccacctatgggtcgctcagccatcgatatcaacacctgttctggtggaggtggcagtggtataaaatggactctgtgacagttcttagctttggttgtttaatgctctatttttgtgctggtttgcctcctgctgggaggtggcactttccaaagagcaccagctgtggcagtttggagaggaaccattggtgggtggggctgtagaactcccaagattataagccctttgtcttcagctaccagggtgggcagggaaggaacatcaggtgggggcaggtctaggtatgtctgagctcacactctccttgggcaggtcttgctatggctgctgtgggggatgtgggtgaggttcccagatgaatggagttgggtacctaagagcattatggctgcctctgctgagtcatgctggttgtcagggcagtgggggaaagctggcagtgacaggcctcacccagctcccacacaaacgaaagaaccggtctcactcctactgtgaccccccaacagaactgagtctgtttccagccagtggatgaaccaggcttgagaacttgccccaggctacgagcctccaaactgcaaaagaaaagggcttcgttctttcctgcctgcagagtctgcacacctgatctgtgccctgcctcaagttctgaccaggaggcttctcacccagttcaaagtgtcacaaagtgcagctggagatttccttctccctttggtgttttccccctctcacctgagtgccctcccagtggatccctgtggtgccaggcaggaatggcctgcctggggtccagcaagctcccagggtctttcccgctgcttcctctatccctgtattttgctcagctctctaaattgactcagctccaggaaatgtcagaaacttctcccacaaacagaccttcagtttctccagttggggtggggtatgtttggaagaggaggatctctctttcccatttccgaagttggggcactcacagtatttggggtgtctcctgcctccttcagagggtctgtgggtactcttgggatttctggtttgttcttgcagttgatctggagctaaaattcataatcggaaatggtattgtattttgaattttagttactgcctgttcattgctctgaagcagtgtttttctccccccaactttttttcctttgtgcttcagattggataattgccatcaatctctcttcaagttcacttagtcttacttcttttgtttccattctgcttttaagcccagtgaattttttatttcacatgctgtgtatctcagtttgatgaaggccaatttatcactctactgcttttaaagtaggctcacaaaatctaacctaagtgaggtttcacctcttggtctgaggctttttttttccattttccaattaataataagttatgagtaaatattatttataataaaagacaaagtctatgccactgctttccattttcaggactacctatggaaacctttgctttccagtctgatgttgacagaccattttaaccaaagctgaatgaaagtatttggggtttataataattttattccatcttcttatccaagtaaggaagctctccaccattcctagtttgctaaggctttttctttttaaaatcacaggtgtgagctgcattttatctcaatcatctattgagatgattccaggaactgtttcatccttatttattaatagtggtgaatgatattaacaggctccccaccgtggcactcctgtgataacttcttggcagtatgtactgttggttacctgcttggcatccagtctcctttttgtcttttctaacaaaactcaacttgtgctcaggtgtctcttccaccctcagatgattcatcgaaagctgactgaattcccagtgacaggagtagactgcccttcatcttagccagatatcacaaggctattcctgagtgactaaggaaagacttatgtcccatgatgtggtaaggccctatggacataaaacataaaatacctctccagagaaaaatatagaatcagaaattatgattttatagaaaattcatatttttaatcagtagattccttggataactaaattcattggactaagtattatttcccaaatcaaatgtcattatgttgtacattctgtttgttaaacatctgacacctaagcatatgacatcctttctttgtgctataaattttatttttgcctattgtgagtatatattactctttatactgaatttttaaaaaaattaataaaacaatttataaatatggcaaatgtgaagattggcagtagttcataagttgtatcagcttaatctaaatgattcagccgggagattattcatctttcttgttggtttctgtttttcaaaaagctatagttttgggtttataaaaaaagcacagtgtaactcctggtggttaagatgagatattttgtcaacttcctgctgcaggagaacttaataatgaaattattcttatagctctctaaaaatttggatatattgaaatatttttcttcataattctttagtgtgcttctgttgcttctctgctaaatatgaacaaggacgcatatagccccatataataggaaaataggatatagcagtcatttgaggataagtgactgctacaataagataaaaaaggtattgtcaactctgtcaataaagaagatagattttattgccttctcaagtaacagcttcccatgtaggtaggtagcaggtcaaggcaagaagacagctttgctccatgatgtcatcaaaggacctggttccttctatgccatttctccatcaactcaggatgctgtctttatccacataggtgatgcctctacattccagaacatgaaagtattctgacatatcttccttggacatgacatatttttctatgtattgctggactttgtttattgtcactttaggtaggattttaatgtgtatgttgtccctgaagattggaattctttccctacttaaattctttccctactgtccttgtccagttttggtatcaagggtgtctagttttaaattctccagtatagttttataggataaggattatttattgctttggtattcatggaaaagcctgagaacttatttaatgattttccatttcttcttgagtcagttttggtacttataattttctctatggtaagcccctgcatatgttttaaatatattgagataaggtgatcacagtatttgcaaaattctaaaaatttctgtgattatgtccactttttcatttctaataccatttctttgattgtttatttctctttttttctgctaagccatctttagcataactttcatcctcatgatgccaaggtggctgtttgcagcggaccctatccttgttggactgaacaaaggatgacaaacatgggaataaagacaaagacaaaagagtatatttggaagaagaggtctgggggctccttgcttccagtgaacacaggccctgagcctttacagcccttcgtatttattagagtgaatagggagaaggggggtggttgtcggtcagtagcttgatttacagcaggcttgcaagactgcattcgtcaaccaataggctctagatgtcccattagataacctcaaggagcatgacaccagggagtgattgccttcagcaaaccttctggtggctggagcagaagcgactttgcccacattctgcattcatgataaacagtttgctgtttgatcatatagcctccagtggaatgttgagttggccacgatccctttgccagctctctacagctgttctacctgttgacatcctgtgtcatacccaagcaggaagaaggttgtgtgagatgacaaaaggccagagttacatgccagctgtgtctctttccacacatccaccaaacccccagcaaatgtgtacttaaaattcattggttacagagccactactccttacaaggagactggggaggtgagtattataagctgggcagatggccacttgaagagcatcaatgttctgctgtggaaggagtgcaaaatagacaccagagagaccattagcagtgtctgccacagctattacatggctaggtccacctgactgaaactaagccttttctatgagactgaagtgctttgagagaaatgctgaccttgtcctttctgcagcttgcggctttcagtcacccttggattcagagatagaagtcatcttaattccatcactgaggccaggagacctgaaagaaatcaattcaagagtaaggagaccaggcgtgcagtgtgactgggcgtgcagaggtcagtgcatctgtgatgactggtgtaacagcatcactgcctgtgagccagcaaggcccttggctcccaggatgaagctctccagttctgataaggcccctgggggagagaccggtcctaaacatgttcaagaataaatccatcagctaacttcagaccgtgattcacacaggaagggaactttaagaggtcgccagggctggtatttttgagacgttaggcagccctctctgaggcgatgacaagtgaatggcataaaggagccagcccagacgaaaatttggggttagactatttcgacccaggacgtgcaaatacataggttacaaaatggaaaatggtattttggaggatgggaggcccgtgtagccagagataatgggagaaggtgagggggcacccaaaacaatcccacaagctctctacatcccccttcctagcccacacacatcacccatcagagtgatcctccggactccggaggcccccaagattgcctttcccttcccggtcggcagtgacgctcccgcaaggagctgacgcccaggcccttagcacctgtcacagccaagcacccttttactccggccctgcggtcccacccctcgccgcaagccccgcctcacccggtctgccgctgcgcctgcgcgactcccagaagcctttggggggtgggtgtgtagtcagagcggcctctgcttccggccacacccaggcccagcgttggccaccacttatgcggcggctgcggtccagggacaagtgagagcgacccgcagagggcaggacggacgggcgttgcataggcccggggccaaaccgtatcttgcaacctgagctccgagggccgccgcatccgtccctgcttgggactacgcttcccagcgggcattgcgccgaggccacgcccggttccggcggcgctgcctgcgcactggaagtgggaagcgccgggcttctctaggctgaggggcggggcggggcggggcggggcggggcggggcggggcggggcggggcggggcggggcggggcagcggggaggggtggggaggggcggggcgcggccgggggcggggcggctccgcggcgcggcccagtggatgccgggccatgggggagcgcgcgcggggctgttcgctgggcgtggcgggcgggtgtggccaggggtgtgggtctgtgagggaccggtcggaagggcgtcgcgcggcctcgggtgacatgcggggggcggcgagcgcgagtgtccgcgagccgacgccgctcccgggtagaggcgccccccgcacaaagccccgggcgggccgaggcccgactgtagggactccagccaccttggccctccctgcccggggaaggccgcgctcaaggaatggcctcgcatccaaaggccagcgaggagcggcccctacggggcctgggcacagaggtgagagtgacaggtgtttggggccgagcggacagggacgaattcatctcgggatgagatctgggagggggttgggctctcggggaccagttgctggagaactgtgcccctggtctttgaagctggtggagtgggagaatctgaagatttggaagctcaactgattcagagcagcaagccgcggtaaaagggtgttgactttcccagggtgactctaactagacgcttttcctgttttcgtgctcccagggaggaaaaaaacctatctccacgttgtggcagtccctaggcagggtaatgatctgatcccaccttttcatgcaggaagggacgtttctaggctggtgatttgggactgtggtgtagacctggtctctagctactcctttctctttcagctctgccttccagggacactgctcttccccaggagagaaacaagaagctggaggctgtggggacaggaattgaacctaaagccatgtcccaggtgagttggcatttcatctcttgtctctgaaatgcagtcttgcttttcgggacttaatgttgcttattttcttgaaagttttcagtttaagagacctgtttgggcgcgggtttctatttcttcacgttctagtgaagtgatgggctacggggaaaagtttaaactgcccggggcctcgatgcctgcttcttcttcatcccaatcagccttcattcttgattgatgaaatgattcagcctctcccttgtaccgcttttctcagagggactctgatggaggaattgtgccccttgaggaacacggcagactcttctgctatacatggtttgtttggtgaccactttgtgccagccactgagcaaaccaatagctaagccctagtccctgctctggagctcacagcctgttgacccaatgtcaaggaaacaagcaagattctagaatgtgatcatccttgggccaagtattatgagcgaggactacaaggcgctcctggcttccagcctcctgtagcggaagggtaggcctatttaccaaggaggtgatttttgagccttgccttgaagggagagaagatgtttgggaggcacagtaaagaaagacaacattttagggagaggaggcgcaatatgaaaggcttttccacttgattttgtggctttaaaacatgccagtaaatagttgtgtttgtttcggttggcttctcctataaatatcatagctagctcattaatagatgaaccatttcacttccactgaggcctcaaaaaatatatgtacagatgaaccagcttccagttgtcctacccaaactgctcttgagtgggttactgtgatcttcacattaccagatgcagtgctcaattcttagtcttttttgactatcattggtatttgaaatagctcagaggctggcaaacttgtgctggatgaggccacagcagaaaatatgttaggctttgaaagtcctgctgcatctactcctttctgctcttatagagctaaagtagccaaagacaatatgtaaatgaatggatgggctgtgttccagtaaaacttcagttacaaaacaggtggctacctatccctcaaatagctcatccctgtccttcaataggcccccttttttcccttggctactgggatctcacactcatctgactttcatcttcctgactgctcagtttttgccacagttcttacctccgtgacttgaacagagtgtgcctcagcactctgctcatggccctttctttttttgtctgcatgctgtctcctggggatagtagcctgttccttgtctgtacaacctacccacatggtggctcctcccagattcacattgtgagcccaaacctctcctctgagccgccggcctgtgtatcctgctccactcctctgcctgagtgtctgatgggtaactcaagacagcctgtccagacccgaagtcctgagagtctcccataaaccagctcctcccacagtttgagtcttagtcagtggccgtttcatcctctcagttactcagtccggaagccttgtcatgattggctcatttcttgccttttccttccatatttggtcctgatgcaaatcctgtcagttctatttgcaaattatgtgcagaatctggcagttttcatcacatctatcaccagcagcaggtccaagtcctccttttactgtgggcttcttgactgtgcttctgtgacctcctgcttctgctcacgctccccacagccccttcccgatgagcagccagaggggtctattcaaacatgtcaccttgtgtcacgctgtgctcaggaccctccagtggtttctctgaataaaagccaaaactcttcctgttactgaccaggccctacatgacctggctccttgttacccctgacatctacatcactctcttctttctgaaaaatcgccttctcattttcctgctcaccctgtctagaatttcagagcctcctacctgttcttcacatccctcttccctgctttgcttttttcttttagtacttttcttttgagacagagttttgctctgtcactcaggctggagtacagtggcgtgatctcggctcactgcaacctccgcctcctgagttgaaatgattctccttcctcagcctcccgagtagccaccacacctggctaattttttttttttttttttttttttttttttttagagacagggtttcaccatgttggccaggctggtctcgatttcctgacctcaagtgatccgcccacctcagcctcccaaagtgctgggattacagccatgagccactgtgcctggccctcgtagtacttttcaacatactatatacagaaatcccacgtataccaaaatttgcacttattcatcagccatgtggagcctgcagatatgagaagtcagccctcagtggacacaggttttccataccacaaataatcttttttgagacaaggtctcactctgtcacccaggctggagtgcagtggtgccatcacggctcactgcagccttgacctccccaggctcaagcagtgctcccatctcagcctccgaagtagctggaattacaggcatgtgccaccatgcccagctaatttttgtattttttgtagagatggggttttgccatgtttcccaggctggtctcgaactcctggcctcaggcaaccgcccgccttgggctaccaaattgctgcgattagaggtgtgattccccgcgcccagacaataattgtattttcagtctgcatttggttgaaaaaatttgcatataggtggacccttgcagcccagatccatgttgttcgaaggtcaaatgtattttacttaatttatctcagtttctcttgtctcatttccttacttcataggcaaggatttggggcagttttgcctaatgtctgatacagaaaatatttggtggatgaatgtttgaatatagtcttaaagttctcttgtggccagtgttttgatatttagtatagtgttagaatagtcatttttatacctgaaaatgtgcttcgtccctgatttttttattttgtttttttgcttttagagacagggtctcactctgtcacctaggctggagtacagtggcacagtcatagataattgcagcctcaaactccgggcctcaagcaatcctcccaccttggcttccaaaggagctggaattgtaggtgtgagccaccatgcccagcccctgattattttgtatgaatacattcctagaagtttttcttgcctcatggattaaggtttcctaagcttatgtgaaatcggaatacttctaaaattatttttggatagaacagcagtggtgcctcaaaagctagaattcatgttttgaaaaaaatgtacacttcatcaggaataatagttattaccaaataaatgtttatttgtatgttttaaaaattaactgaattgaatttaaacaaatctttttagtgtattttttctataaagtacttcatattcattcttttctatgaaatttcaacagaaagatttttctgtaagtataaagttgcttttattttttgttggtattcttttaatgtctctatctttgtgtgtgtgcgtgtgtttatatattatatagaatatattatatatgtatattttatatatatattaatatatgtatattatatatatatgtatatataatttttttaagagatgggagtctcactgttttgcccagactggagtatattggctattttcaggcacagttatggtgtactacagcctcaaactcctgggctcaaggaattctcctgcctcagccttctgagtggctgggcctataggcgtgtgccaccatacccagttcatatgtatattaagatgagttaacttacatcagatgcctatatcaggagtagattctgtgcctgtataatgttttctctgtggtatagtgtaaaaatgtgaaacccattttgaagtctgcatatttatgttgcagcaacaggaataagaacaggacctgcacatttgacaatgttttgtctccacctaaattaagtaggttgatccagacatcagttagggaaagttcattttatttttatctgaaaacatgttttctactggaacttgtttcactgtcagggtgaatggatactaagtattactgctattatcaaagtggaaccttttaatagaagtagaatggcaaagtggtcaaaggtcatggactaggttcacatgctagccctagcatctaatcattgcgtaaccttcaggcaactcaagtgaccacattttcttcatctgtaaaatgaggaaaataattggacctgcctcaagcagttcttgtaaggattaagttaagatgtgtatagtgcctggattgaggtacctggcacatagtaaggacttactagtgttagctggcagcatcctcatgtcatcatgacggttttagaaatttacaggcaagacacttagatggcgtacttcaaaaaaagtgtttaatataggaccgaactgggcaaattatggcctataggccaaatccagcccaccaccacctccttttgtgtggcccaccagctacaaatgagttctacatttttcagtggttgaaaaaaatcaaaagaagaagaatacatgaaaattaaatgaaagtcacattttggtgtccataaaaaaaatttcattgtagcacaacatacttgtttgtttatgtattatctatgactgcttttgtgctacagtggcaaaattgaagagttgcggccaaggctatttggcccacaaagcctaaaatatttactttctggctctttacagaaaaactttgctgacacctgaagtggaggttaagagcatggactgtggagtcagactcctgggttcaaaacccagctctacagctgactgtctgtgatcctgggcacattacagctcaatattttctcatctgtaaaatgggaatagtaatagtactgactattaggatcgttgtgaggattaaataagctaatatataagtatatagaattgcgtctgaagtgttgtaagtgctttcagctattgttattgctgttatttacagtaaaagacatttttaaaacaaaagtcattgattctatacataaagagctgtccgaataaacagaaaatgtcttaggaggatatatgtatattgctaacgttgggtccctctacgtgattacattgaaggcatttaacaaaccactggtacaaaagcagatcactaatgcatagcatgatcaacctgggaaactagggttgattcttcttggcaagcaaataagttcctcttcttttatgccaagatgcttcaacttgcaaaattattgctgagagctgaccagcatttgttttagactagcttcctcaggtagccatattagtgtgtcttttgctcaaggacattaagcagttcttggctgtttcctgcaagtattacctcatggtttacactgcagggggcctttcagtccccagcttaggagacttctccatgatgagtttaccatcaagagtgtagctctgcagttgactgattcaactccctctgcagttgatattcactcaaattgggatatcacttacaaaacccttttgacctatttttacacaattcagttacaaatgtccttaaagtttggtagcaggttaaagaacaagtgattgtatattattcagcagatatcaaacctcaaagggacttttgtttctagtagaataatgtgaatctttaaaaggttcagctcttggttggtgttgtggtttgttaagtgaggtatttaaattaggttttgtgtagtcagatgcagcatggtgagggacacttagagcagaatggcaaaaagattgtttattactcacagattccagagaacagtggccagcacaccttgcagggcttactggaagggcttggagacattgaggacacacatgcccagccaaagggtggggaccaagagagagggagggacctgtgggctggagcctttattggggttcagggcattatctaggtgagtttcccaagacagggttggcttggatactttgaagggagctcaaggctcagtaagggaacttgaaggctacattatcaggttcaccaggcttcatgcagaaggacagtagtcatttcatagtatggggccttttctatctagaacacacaaatggggactgggtgaggactgcctgaaaatatataggtcaagggtgacaagcagaggcagcatccctatggatgagagttatgacagtcagcatcattacaagtcatgttcactgcatgcttccattgtgccttgcacgttctaagtgctgtgtatgtgttgcctcatttaatccaaaacataatctacaaggttggtattgttgccttttccattttatagctggggaactgaggcacagaggcgttaggtaaccaagtgaggtttcagagctggtgagtgctggaattgtaattcagcttttggggtagtccaactgtttcgcatgttcatttcagtttagactttgaaaatcccacagctgctagtcagttaaatctgccttctgttagccacaggttcctgggattagagttgcaactgaatagatgtttaaaatacattggaacgtatcagagttgtaggctgaatttgtaaaactatgctccataaaaatctgccagcaggagctgagcagccccatcttgccagttggtcaagaaaatcctgctcatgccaagctgttagcaaatgtgctcctgatagctcctcataatgcctagcttctccaagatggcaccttggttcgtaaaggcatttcattaattaaaaacattatagtgctttttgtttttcattcttattacatattcattttagaaaaaaaaattgctagatttttttttaatgacctctactgaacactgagagtaaaaatagaaattcttagaacccagtttagtcatgaataatattgatgctttgaggttcatctcaagtttattgcccagttcttgtgctgcttcaggccactcacatgtccccatgttggacagtgctgtagtacctgttgtgcatagaacaagttagtctttgttatttatagttttgaattgatgtcaggggtttttcttgtggctgcctcctttcacctccacaaaactgcaagttctccaaagtcaggggctgtctccatatttttctcttttacctggagtttaagacagaatgaggctagctgtacaatacctaactagatctccacagttctgagtttatagtctcttactcaaaatgaagacaaggaatctttagatccctatattagtttgttagggctgccagaacaaataccacagaatgggtgtcttaaacaacagaaatttcttttctcaagcttctggaggctggaagtccaagatcaaggtgcctgcaggtttggtttcacctgaggcctctctccttggcttgcagacggccgtcttctctctgtgtcctcacgtggtcttttccctgtgcctgcacaccgtggtatctcttcctgttttaataaggacaccagacagattgggttagggccccacccatatgacctcatttaaccctaattacctctttgtaggccctgtctctaaatacagtcacattcaaaagtactggggattaggagtttaatgtaggagttttgtcaggggacacatttctttctataacaaacccccagtcatgtgggggcatgagcactggttgagcaagaacatggttatatcatttcagggcttggtgacatttggggatgtggctgtagatttctcccaagaggagtgggagtggctgaaccccattcagaggaacttgtacaggaaggtgatgttggagaactacaggaacctggcatcgctgggtaagggctcccaccccttttcccacccctcaccctacccacgtcctggactaagaagcctttcatgcctttatcacccagacctgcactgccctcttgcgtcaagccaaggggactgcatctcagtctggacagccacacagtatgaccaggttgttttttatgtgtctaggactttgtgtttctaagcccgatgtgatctcctcgttggaacaaggaaaagagccttggacagtgaagcgaaagatgacaagagcctggtgcccaggtgagtgtgggagaaccaggtagggtgaggccactgctggtcatagttcagctgactcagacacgcaacatcttcagcagactcttcctaagcctcttgcttaggaatatctgttatttttactatttgggaatacagaaatttcaactacagtattatttccagaacagcaaattattaagacaaggaattagaattatagatttctttcagaggttttatcctaacaggaaatggttacagtttctaaagcattgggaatcttacaaggtttctttgttcaattcacacttcaaaggaaacgcttgcattgacaacaggacaagttactgacagttataaattaaagtgactcacatgggtcatcatatagcataagagaacaagaatgtgtgaaagtttccaatttaacatcatatgaaatcacatactttgagctagtttaatgagatagaactgttttttcttcctgcagatcattcatctcttcttgagactagttaattgtgaagacttacatttttaaggccaggatctggacttttattagttagcatcgtaataaaaaaaaaggaggtatgtagagatagagatgaaattttttctagatgaaatggacaaggagtgaaaaagagttgacttaaagctgaaataaggatcatatggcagttttcttctatagcctccactttctctttatattagacattttattttacatttaagtctttgtgagctcccttatctcttgatttttaattgctttttccagtcttctgctaaaaacataatgtgaactcttattcaacttttaggtgggaaaggtcttattgtggcctttaggactatggctacacaaatttaggaatgtagggttggttgaatattgctagtaatataagaaagctttcaaaatgatatgcttttcattttcttccataaaaataaatgactatatgcttttttgtggcttttaatttaacggttgcattttggaatttttcttcatactaacacatgataaaagataaatttaccttctttacgtctttcagacttgaaggctgtgtggaagatcaaggagttacctctcaagaaggacttctgcgaaggaaagctatcccaggcagtgataacagagagactcacaagctataatctggagtactctctgttaggggaacactgggattatgatgctctgtttgagacacagccggtaagtcacaagacaaatttcaggcaagaggaaggatccttcatgaggaaactcttcttgagggaagagaccatgactacaacaactataagagaagttttcatttgaatacaatgcttcttatagacagattatcccctcagaacagagagtgcctaatctccatacacataagaacagtggagggggaaattgagttgtaatgaattacaaacaaatctgtcaaggtcagaaatgtttgacttgtgatgaatgtaagaaagctttgagcagaggccaggcgcggtggctcacgcctgtaatcccagcactttgggaggccgaggcgggtggatcacaaggtcaggagatcgagaccatcctagctaacattgtgaaaccctgtctctactaaaaatacaaaaaattagccgggcgtgctggcgggcgcctgtagtcccagctactcaggaggctgaggcaggagaatggcatgaacccgggaggcggagcttgcagtgagccgagatcgcgccactgcactccagcctgggtgacagagcaagactccgtctcaaaaaaaaaaagctttgagcagaatatcaacccctccttttcatcaaagatttcatacaagagaaaaactctgtggacttgttgaataatttgtatgaatatgggaaagccttccgtctgttaaaaggttcatactgtgtgtaagttcatactgtgtgtaagtatgacaaactctccatagcagaaagtttctcctatttttctgtgtttttccccaaacatgtatgctataactaagccctgtcattatttgacctggtgtaccagaacttaagttgcagttcttggtatggagtgccttttttgcagtgtggacacagtccatcccactgagaccaggtgagttcacgaacatggtttgatttaaaaaacgtgcttttaccattgcagggcttggtgactatcaaaaacctggctgttgacttccgccagcagctacacccagctcagaagaatttctgtaagaatgggatatgggagaacaacagtgacctgggatcagcaggtaaggatgtccctctcccatatttgaatctatcgtcgggtacctccatttccaaacttcagttttgaattatggaggagggagggggtgtcttctgacatgctggcctgaattttgtggattcctaagataagaatttggcatttgtagaggtgaaagttggtgtctttgttaggcttgaagcgttatcttcttgtgtctttcagatcctactcacctgtttttctgtttctttcagcagtaacacttttctatcaacaaggaagtggttctcaattttaggatgccaagactattggccaaacctcatctcttttcactttttcaggacattgtgtggctaagccagatttagtctctttactagagcaagagaaggagccctggatggtgaagcgagagctgacaggaagcctgttctcaggtgagtgcaggagagcctggtgtggaaaatctactgcaagagagagcggagcttttaccaaaaaggctgcatcctcactaatatacagtaggaaactttacccagggtctctgggtctggaaagaaaattgaactctgggagttccaaataattctttcctcctcctttgcccccttctctccagtaactgccatttccctgaagttccttcttttcttggccactgggacgtgtatcatccacttgcttccttaaatgatcttttctggaccctgatgcacttttgagctgacttccaaaggttttctcttctgtggttaaatggcctattgttttcatcatgcatccattcctgtgagaaccacaaattgaaagttatgggattgagccactctgctgagtattggcaggcgattggaaaaagggagaattacacataaatgtaagccatcagtgaattactctaatggaaaggataagacatgtttatggatagcttgcatgaagtagagtttgcagaatttcaaatagggcattatagagacaaaggagatgttgttcccagtggtgtctatgttttagtaggacaggtgggtagaagttgaattgcaagaaggtggaagtaaaggatcttttcctcttgatgcacaagggaaagaaaggaaatttccatagaaaataatggtttgtagaaaatgtaattgtttactgtttggcaaaagaatataaaaccgtgacgttatcacaacatacaccttagatccatttaagtcaggataaacacacattttttcacatagtagaaattacagtgtatattcagttacgcatacacgtttttcatgtggattccacgttgtatataccattgctcacttaggttgctttacatttcttagtattaaagatacaattataatagatttttttcaagttaagtgaaaactacacattttggggattgctgtattcctggatatgagcacctgctaggctctgaaagtttttttgtttttggtgactagcaacaattagatgtatgagtttaattgcatcttgaaagtattggttatttacatgaaaacttttgctcattatttgttgaaagattatacactaaaattattctttttttatgaaagaagttgaacattttttcgtaaatttggtttttctcttatcttcttgtaaaatgtctgtcatttgtacccagttctctcttgtgtgttaaatattttcttaacagtctcagtgactgctatgtatataagcatactaattctgtgatatattgtctcaaactattttcacatatggcaataagagttttaattttaattaggtcttttaaaattatgacatgtaaaaattttcaatttttatatagtccagtatattatttctaatgtgatttctcctatttgtgtggctaacaacttgacacatatagttctatttcatttttaatgactatttagtattatatgaatatatataatttatttaaattatttactgttgagtatatttaaacatttaggaggtcttctccagttttcacctataatcaacagtggtccagtttgtacatatcttcttgcttacatgtcagaatatttcttgaagatatatgcttggaaatgaatttgcatggtcgaagtatatgtatttttaaagtgtcatggatattttgctgtaccgttggtaaagaatatatgagaatactgtttctagacatcatcaccaatatgggtattttgtagtttaaaaaaaattttgccaagctgctagatgaaaaatgttttatttaatttgcatttccccaactacttacgatgttgagaatatgtgctcttaaatctgtttagagtttgtattctattcatagtgtgtttatactcattagtcacatttctattgggttgtatattttcctgtatttatgcaacattgatatgaatgctattttttaataagtttgataaaatttttccccaattttgtgtggtctagaagtttgcatatggtatttcttactatatagtagcttaacttgggaattatcttcatttatagaagcacgtactttgttgattttttcatttgtttcactcctatctcttaaaaaatgaatagatgtatagtcccatttgaatcatataatacatttgtttgaccttctgtaacttaattatttctctctcctttatcaccttccttccttttctttctttccttctcatttttcccttctttccttacctttctcttctgtattttgctgtgtggcctgttttttgtttgttttatttacatatttttattatagaagagtacacataaaatttaaccattttgaagtgtacaattcagtgacagtatattatgtgaggtgatatggtaattagcttgattgtggcaaacatttcaccatgtataagcatatcaaaacattttataccttaaatatatacaatttttatttgtcaactatgcctcaataaagctggaaaaatattgccaaaaagagagaaattgcaaggcttcattatagaatggccagagaattgaggatgttttcaggcttgtggaagtaaccaggaaaatgtgaaaataattgttttttttttttgagtcagattctggctctgttccccaggctggagtgcagtggcttgatcatagtttactgccacatcaacctcctaggctcaagcaatccccctgcctttgcctcctgagtagctggaactacaggcacatactaccatgcctggctaattttaaaaagttttttagagatagggtcttgctatgttgtgcaggctatgttgtcctggcctcaagtgatccgcctcaagtgatctgcctcaggtgatccacctcagcctcccaaagcactgggattacaggtgtaagccactgtgcctggccctaaatgtaatagtttttagagctgtaaaatgtatgttgatgaattcaccaattagtgaattaattcactagttttccttttggcagattcctttttcctagcacacgaaaaaggaaatatgtgttttcttggtatctttcaggccagcgatctgtacatgagacccaggaattatttccaaagcaagattcatatgctgaaggggtaacagacagaacctcaaacactaaacttgattgttccagtttcagagaaaattgggattctgactatgtgtttggaaggaagcttgcagtaggtcaagagacacaattcaggcaagagccaattactcataacaaaaccctctctaaggaaagagaacgtacatataacaaatctggaagatggttctatttggacgattcagaagagaaagttcataatcgtgattcaattaaaaattttcaaaaaagttcagtggtaataaaacaaacaggcatctatgcaggaaaaaagcttttcaagtgtaatgaatgtaagaaaacttttacccagagctcatctcttactgttcatcagagaattcacactggagagaaaccttataaatgtaatgaatgtgggaaggcctttagtgacggctcatcctttgcccgacaccagagatgtcacactggcaagaagccctatgagtgcattgagtgtgggaaagctttcatacagaacacatcccttatccgtcactggagatactatcatactggggagaaaccctttgattgcatcgattgtgggaaagccttcagtgaccacatagggcttaatcaacacaggagaattcatactggagagaaaccttacaaatgtgatgtatgtcacaaatccttcaggtatggttcctcccttactgtacatcaaaggattcataccggagaaaaaccatatgaatgtgatgtttgcagaaaagccttcagccatcatgcatcactcactcaacatcaaagagtacattctggagaaaagccttttaagtgtaaagagtgcggaaaagcttttaggcagaatatacaccttgccagtcatttaaggattcatactggggagaagccttttgaatgtgcggagtgtggaaaatccttcagcatcagttctcagcttgccactcatcagagaatccatactggagagaagccctatgaatgtaaggtttgtagtaaagcgttcacccagaaggctcaccttgcacagcatcagaaaacccatacaggagagaaaccatatgagtgcaaggaatgcggtaaagccttcagccagaccacacacctcattcaacatcagagagttcacactggtgagaaaccctataaatgtatggaatgtgggaaggcctttggtgataactcatcctgtactcaacatcaaagactgcacactggccaaagaccttatgaatgtattgagtgtggaaaggcattcaagacaaaatcctcccttatttgtcatcgcagaagtcatactggagaaaaaccttatgaatgcagtgtgtgtggcaaagcctttagtcatcgtcaatcccttagtgtacatcagagaatccattctggaaagaaaccatatgaatgtaaggaatgtaggaaaaccttcatccaaattggacaccttaatcaacataagagagttcatactggagagagatcttataactataagaaaagcagaaaagtcttcaggcaaactgctcacttagctcatcatcagcgaattcatactggagagtcgtcaacatgcccctctttaccttccacgtcaaatcctgtggatctgtttcccaaatttctctggaatccatcctccctcccatcaccatagcctcgagacgtcatttctgtttgactactccagcagtttaaaaccccatctccctgcccttttgttttctttttgtcccttattagttagttcttcacataagtgtaaatgtaacttattcactcctcttgtaaaacttatagtttctttaaattggttaatgtgtgagatgtgctcagcacagtgcctggtccatagtaagtgctcagtaaacttagctgttttaaaaactttgtatttgaacattgaaaagttacagtagtcagctctgataaaaaaatgatgcagtagggtgagggtaggaaaaagcacattttctatcaggaacagaattctccagtagtgggtgaggttttgcctttgttggttttaaaacttgattctataatgccaagttagttttgtggctttccatctgaccctatgtgaatgtaaggtgatgtgaccttgttggtgagaaaattaaactttacatttgacttgatttgttttagaaagtctagggaccatgaatgaataggccagctgggacaaatgaatttaaaaaatcagaaaaatgcaagatttatatgcatgaagttaaaacaactgacgttactcaagaattagaaaactttgcaagatttgacttgtttaaaaatcacatttataagtgaaccgtattaaaacttttaaggaaccattcattgtgaggtaaactgatccagaataggggtcagcaaactatgactcatggccacagtctcactgactgtttttgtatggtccatgatctagaatttaaaaaaattttaaagggttgaaaaaagtgaaaagaatattttcaacatgaaaattatatgaaatttaagttttggtgtctgtaaataaagttttgttggcttcagccacacagtgatttacaccttgattgtgctgcttccaggctgtagcagcagagttgagcagttgtgacaggagaccatgtggcctgcagagcccaaatatctactgtctgatcctacacagaaaatgtgtgtgatccctgctatggagcagaggttatcaaactaaagcccatggaccaaatcctatctgctgcttgtttttgtaaatagagttttatcaaaccacagccatgcttacttgtttagctattgactatggctgctttagacaactgtgacagactatatggctcgcaaaactgcaaatatttcctatcctttaacagaaagtttgccaacctctgctctagagtagagaaaaatgtataaaagattttaattttatgagggcaatacaactgtcacatcagaaacaagaaaacaaatgataaaggaactcatttatcaatagaggtgaaaggaaattattaaactatattgaaaaataaagatgtcaataaaaggagaaatgatatttttctagatgaaatactcaatattgttaaaatgtttgtaaattataattcagtcccagtaagatatatttactttgacggtaacagggaagcataattaggcaagaatagcaagaagttttttttgttttgttttgttttttgagatggagtctcactctgttgcccaggctgaagtgcagtggcgtgatcccggctcactgcaacctccgcctcccaggttcaagcaattctctgcctcagcctcccgagtagctggaattacaggcacctgccaccacgcctggctaatttttgtatttttagtagagatggggtttcaccatcttggccaggctggtcttgaactcctgacctcgtgatccacccgccttggcctcccaaagtgctgggattacaggcatgagccaccacgcccggccaagaatttttttttttttaagagatggaggcctcactctatcatccaggctggagtgcagtgctaagatcctagctcactgtaaccttaaaatattttttttgtagagactgtgtctcgctttgttgcccaggctggtcttgggctccttgcctcaagtgattctcctgcctcactcttccccaaaatttttgaaatagatttctttgcatatgagattttagtatataatggcactattatttcaatatcgggaaaattatgttttgacaattggttatccaccctctccaagaaaaaagttagaagcacatttacaccttacagagaaatatgactatcatatttgacatatctaatcataaaataacatgttagaggcaaatgtagaaaaaaggaacgtattatcaagtaggacatggagtcctagaagccataaagaaatcgagaacaagttgggctatgcaacgatctaaaacttcagcatggtgaaaggcaccaaaaacttgtaaaagacagttgaagggaaatgtatacaacttatagaaaataacagaatgctgttacatatacagagcagtggggaacaacttgccatgcacactgataggcgaatcaccctgaagaatccaaatggataaagaaaattcgtgaaattcttaacctcattaatcagaagaatatgaatgaaaccacattttcctggctcttggtagattacaatataaaatttggataatatccagtaatggtattagtgtgggaaaacaggtacttgatcactattagcagtgtaacttcgtcccctatctcctcggatggcatgacctatcaacattataaacgtgaatttttttcaaacagtaattccagatctaggaattttatcccattggaataaataggtagatataaatattgttttcttgtagaattgtttcaattatgacaaataagaattcagcgccctgccaagtggattgactaaattgtagttattcagtactgtgttgtgcgattagtagaaagcagttaagctctacatacacttctatggagtggcgtctacaacatatttaatgaaatatgtggtttacagaaccttacaggtaaaatgacctagtcatagagtcaaaattaatactgaatatatatgtgtgtatgtacatacaaacacatgcacagcctcagtatctatgttgaaatctggttttgtctttaacacacagacttttcctagcattttgcgggcactttccctttcttcattctgtattgttctgatgaactgtcagtgacacatgctccaagtaagacaaccagattcattctctgtattttgattagagacacagggacaggaacagggccaatattcagctttatgaaccagtatggccagaatggatgttttgttttagtcaatattcattttgattggtgggacctttattatacctgctgtgaagtatgtgggatatgactcctaggctggaattcgtttgaattaagtcatcctttggcagcaacctaaggattcctccacctgtcactgagatccattgagatgattcctgctttctcacatcttggttttgagttaaattctttgagtctgtgaactacctggtattctaatatttctcattttaagtcagagtcaaatactttggttctcaagcaaagagagctagccaatgcagaaatttatactacagaatgattactagactgtagagaagcagagtattcaagatggatgtccagtgagacagatcaaagcacagatgaattcctaatcctattttgtgctgtgaaaggatattcatgatatagcaggatcctaagcccattgtgcactagggtctggatagctcctaccaaaaacaaaggtattgaggaatactacttccaaaagtatatatgatacctgtttataatgaaattgggtaattaaaatttcaaggctacttgaaattctggccttaaggaattgaatcagtacctgtatgtctgtgttgggaagaatctcatactccttttaagcatggggctgtatttgctaaaaaaggcagcagtagatgcagttatttgctcaacaatgatgcttactgaatgaaggggtggcctgcccctccacacctgtgggcgtttttccttgggtgggacgagagactgagaaaagaaagagacacagagacaaagtatagagaaagaaaagtgggcccaggggaccagcactcagcatacggaggacccacgcctgcaccggtctctgagttccctcagtatttattgatcattatctctaccatctcagagagggggatgtggcaggacaatagggtaatagtggggagagggtcagcaggaaaacgtgaacaaatgtctctgtgtcataaacaaggttagaaaatgtgctgtgctttgatatgcacatacacaaacatatctggtgcattaaacagcagtattgccgccagcatgtctcacccccagccttaaggcggttttctcctatctcagtagatggaacacacaatcgggttttacaccaagacattccattccccagggacgagcaggagacagatgccttcctcttaactacaaagaggccttcctcttttaataatcctcctcagcacagaccctttaccggtgtcgggctcagggacggtcaggtctttcccttcccacaaggccatatttcagactatcacatggggagaaaccttggacaatatctggctttcctaggcagaggtccctgcagccttctgcagtgttttgtgtccctgggtacttgagattagggagtggtgatgacttttaacaagcatgctgccttcaagcacttgtttaacaaagcacatcctgcatagccctaaatccattaaaccttgagtcgacacagcacgtgtttctgccagcacagggttgggggtagggttacagattaacagcatctcaaggcagaatttttcttagtacagaacaaaatggagtctcttatgtctacttctttctacatagacacagtaacagtctgacctctcttttccccacactgaattcacaaccgtgtcacttctgttaagcaattagggaaatactggaatttggattattggaatgagactaacaagaaggattcaaggatcttacaaaactttgactctcccttgactctccctctcaacccttaagcaacctccccactgattctcctctccatgcttcccttgtgactggaaacaaaccttccttccttccttcttcctttccctttcctttcccctgcctttcttcttttcttttctttccttttctttctcagagtcttgctatcccccaagctggagagcagtgatgtaatcatggcttgctgccgccttgatctcctggcctccagcgttcctcccacctcggcctcttcgagtagctgagactacaggcgtgtgccaccacacccagaatttttaaattttttgtggatagttgtgccatgttgcccaggctggtcttgaactcctgggctcaagtgatctgcctgcctcggccttctgaagtgctgggattacaggtgtgagacaccatacccagcctgtgactgaaaacttgattgtcccttttctcacatggtcaccattattgcttggctggtaaccaaaatcagagcttagtatgacctgtagtttgaaatacagaaagttaggaaagagattaatctcacccagaaatatttaatttccttcattaattgtaacatctaaaatctagggaacattgttgcaagtgtattttcagggttagaaattactttgcgtaatatagatggactgaaagaattcagaagtttataatgctggattggatcatttatgtccatgcccttcactcatctgcaagttcccatcagggcccaatagcctttccatattcctttgacatgaaagaagcactgaaaaatgtccctatatctccacctttaggtgcagagacttttcatgagtgattacatttgaaaagggtatccgatttgtgtagaactgtggcatgtgtagtggctggattatagggcaatcattaactatgagaagaaagtaaaaaggttataacaaacctcagaactctagagtgttctgatttctgatatttccactgtaattaataattgatccccagcgttgaaactgcactaaggttttattttaattaaaaacactccatggcatggcatccaaatctcacattgacttaaatcagtggcacaggactgggtcattcaggagtctgaatgactgtaattaaaatttctatgaacaattccatgggaattcgaaaaagacttgcatttatgcagagtgagggcttatggaagaattcttatacaagcgtagcttagaacaaggtctattgagaccacaaatgcatactgtggctatttttccaggtcctgggtgtgcatttgttaatgatatctatgatatgagatgtgactagatgaccaccaaaagtttgtgttcttttctattgtctggaattgatcctgggatgtgtctgcccaggcacctttgcttccagttttgtctatcagatgaattttcttcagtgtggtgtgaatagaagcaatatggcactcagggcttggtttttaagaaaaggatgttctgtccagacggaagtagaatcttaatcatatggaatggcaaagctgaaagatagaactctgtgtccctaaaccactatttggaggaaagctccccagtcatcaaggaacaccagcaatggattattatatgagtgagaaataaacttatattgtgttaaggtaatgatatttggatttcaattgtaatagcagctactataattctaatcaatataatacctttgactaatgatagaattcctattttccctgagttatagagtaggaactgtgatggcgtgttagttgcctgttgttgtaacaaattatccccaaaccttagtggctgaaaacagatagacgttcattacctcagtttctttggggaaggaatctaggcacagcttagttgggtgcctctggctcaaggtctctcagatggctacagtcttagctgtgggccagtgctgcagtcatctgaagattttgttagaggataatcagctttcaagctcaagtaagtgggcaggactcagttccctacaggctttggctggacatgttggttcctttccatgtgggcctctctgtagggcagcttacaatatggcaagtggcttccttgaaaagtgagtgagcaggagaggatgcccaagatagaagatgaagtccttttgtaacctaatattagaagtgatatcccctcatctttgtatttggttaattaggagtcactaggtttagcctaccttcaaggggaggggattacaaaatagtttgagtaagaggaggtggggaactttgagagacatcgtaatggctgtccaccacagtcttcctccgtccccacctcccagtgattcatttcccttccagatgcagaatacactcactccttccaaggcccctctcagagtctcacctcattacaggatcacctcaaagtcaataatcttgtcatctaacataggtacaggtgctaatgaagcccataagatatactttcttaagtatgggtattgatctgcagacctttagacttaaagaaaataaagaacaagttatctgtctcccctcctccaccacccctaaccgatacagtggaatcactgctccatagcaattctgaaatctaaccagacaaatgtttggaaattcctttattaggtcacatggcctgggataattatccaccatctgaactcttggttctgccctctgaatccttttttcctgcaacgcatttgcagttcaatagctttttttttattattatactttaagttttagggtatatgtgcacaacgtgcaggttagttacatatgtatacatgtgccatattggtgtgctgcacccagtaactcgtcatttaacattaggtatctctccaaatgctatcaatagctttcttagcttgcttactagagttttaggaatctagtggcgtctcttcattttgtgctgtctctgtccctctcactccagttggcagagtttctactgagtcttctgaaaatgttgtgggcttcatgagaacctcattggggttcactgcacaagacaaaagccacagccacaaatctctttgagataagcttcttagaggcctaattatttgaataagagtgtctgtcaggtcgccttaatctctttacagagcttttgtgtggttaaatagtactgagataccagctttggtctttctgaggttctggattttacagccatgcccttagtttttatctagaccagttttcctagcagtaacttggatttcatttttgcttggaagccctttcttgtttttggcattgtttgccacctacagaggctaagaattttcaaaatcctaatgtcctctttgttaacagttattccctcaatttatatctcttcttttgcatgtttctgtaagcagcaagaaaacaacagcaacaggacattcagcacattccttgaaaatcttagctacgtcacccagttcttcttcctgcattagctgcaaataacaggctgctaaactttctgccattacataacaaggaccctctttcctccagtttttaatggagtatttctcactatccttttagccttcaccagcacttaagacccaaaatttctggacagtcccttttctatacaagtattggacaaactccaagcatcccaacaaaggctttagcattacctgtctcagtgagacaagagttggagattgagttcaacacagtgaactgcctactaaaaacaaaattcagacggactttttgtctgtagagacaacagagtctctacagtgtgttactcatagagtaagaattattagatatgtgaaaacataagccacattcaagagaagaaagcaatacaaatccttaaacactggtattagcaaacaagaatgataaagcccctattataattattctgaatgacataaaggaaaatgctattaatggatgagcagatgggaatttcagcaaatgagtaaatcagtttgaaaatgggaattctaaaactaagaaatacaatgtttgaaagtaaaaatccactggataggtttaacaggaaatttgaggtggcagaatagttaatgaagttgaatatagatagaaattatttaatctgaaacaaaaaggattgaaagaaattaaaaggactgaatagtgctggtgataatgtcaaaaggtgacttgtgataatgctttgtgttctctgatcttcctagatctgtggtttggtgtttgttttcttgcttttagagacaaggtcttgctttgttgcccaggagggagtgcagtggcaggataatggcttgctcaagcaatcctcccacctcagcttctcgagtagttgggactacaattacacagcaccacacccggctaatttttgtatttttttaaagatggggtctcactatgttgcccaggctggtctcaatctcctgggctcaagcaatcctcccactttggccccccaaagtgctggtatgtatcacaggcatgagccaccacactggcctggtgtcctgtcattaattttagaaaattctcagtcattattcaaatattttctctcctttctctcttcccctcctggtattccagttacgcatatatttcaccttctgtaattgtcccatggttcttggatattctgttctttttcttttttcattctttttttttcctctttgtatttcagtttgggaaatttctattaacatatcttcaagctcacccattcatttctcagagtgtcttagtctgaggggctcactaaaggtaatcttcatgtctgttacaatggttttcaattgctaggatttccttttgattccttcttacagtttgcatctctctgcttacattacccatctgttcttgcatgttgtctactttttccaagatgcttctccttctgtgggcttccctaagaactccttcttaaatagagtctgtgccttgcagttttctctgttgtaatctactgttattgaccagagccccattagtgtggcagtgaggtacagtggggagggaagcattctataatcttattattaaatactatttttctagtgggcttgaggccttggactgtgatcttcagaagcacttcttagcctttcaaaaatcctgccttactgagacagacaggctatagagggactggagctggccaattgcctctccccaaggtccaacaagactctagtaagtagtttttcttggagtgcaggtgtttattatggaaaatgtggtgcttacttttctcctccccttgcccaaaaacctgagatttttccccattcttcactgagagaatttgatagggtttctggaggtaaaattcacgaaagtgtgggggcccatctaagattgggcccctaggagtttttaactcacaagttagcccacactaagcctccagcaattcatcaaaattataaaaaataaaagtttttaccagtttataactccagtggcttctgcttcaagtaagctaatcttggctgtaattttatgtatttttctttctcgggattttggggtgtcagttacctttctatcttcagttctctgatggatctaagaaaagttgattttcagtttgttgaatgattttgttgttgtgaagatgggaatgaaggcttccgagctctttatatgccagagctaaaatgagaatattatcattttcatccaactcaaataaccacaaacgttacaagctctaagatgatatttgctgtttcatagttaaagtatcttcacagctagacttggctttattatgttgtttatgatgtctgacataaattggatccaggagagtccagtctagatgtcactgtgtggccttgggtgattgagtgtgactgggagggtgagttagtttctggtgagccagtatctatgatgctgtatcttggtcagctggggctgctataacaaaatatcatagactaagtgacttgactaagagactttatttttcacaattctggaggctgggaagttaaagtgctggcacattcagttcttggtgagggccccgttggcttgcaaatgggttacatcctgctgtgtcctcacatggcctttgcttggtggttgtgtaaacatggagacccctccttcctcttttttaataagtgcactgaccccatcataagggtatcacccttatgacctaatctaaaaccagttacctccccaaagtcccacctcctaacgtcatcacactaggggttagggtttcaccatagtaattttgggaggacatattcagcctataacatgttgtgtcatggtgagactggcaatgctagatttcgtgatttcctaaaaaataaaataaaaataaaaaactaagcacctactatgtgctgttttagtcactgagaatataaccctgaacaggacggaagctgtgtgccttcttggaaccctccttccagcagggagagataaaatggggtggggggaggtgaggggcgtaccgtatatcagagagcagtaactagtaggcatgaaataaaacaggttccacacgcgcaccatcagaaagtcacaagtgtgcaaagcagacaaatcccaatctcctcacttttctatcgcgtaggccccgcccgcgccccaagccccgccctgtcatggttttcctctccagagggtagccgctacgccttaccgactgcgtttcagtgctgtcccactgctcctgcacaccccacgcctgcgaccctacccaccacggacaggcgctcctgcgagctggaagccagttctctgcgtcctgagcctggcagctgcatctgaacactcggagcctggcgatggcttccagaaacccctgcgccgtgggtcgcttcagtgaaggggcctgtacttcggcgacccagactccgggctgagaggcctcctaatccaaccaggaggaccaggagaggcccaaaaggggacacagggcagtgaccgccaggcttggagaggagccgctcctggcaaagccagcgccctatttctgaacgccgcctccgttccggactacacttcccaggggctattgcagcggaggacacgcccacttccggaaaggacccaaagccgggcgagtgcacgtcccgccggttgctgaggagaagggaggtctgggcggggcagcggccgaggctggactggggcgcggcgggggcggtgtcctggttcctgtgtgggcggcgggcgtgagcgtgcgcgtgtggcctggtggctgtgagtgcccatacgtggtgagcgtgcggtgctgtgctgaggaggggcgagcgcgcgcggggatggcggcccggtgtgtgactgtccggtgcgtggccgcgaatctgcgcctgcgtgcatggcccggcggcgtgcggaaggcggtgtgtgttggaatgagtgaagcactttaagtggccaagagcaggaaacccggccggaggaggcttaccccgttctcccctgtatcgactgcgtagagcccagtgtgggcaaagtcctagagcccggggaagttgcccgggcggggcagcctcggctgaagcatttcctgtcagccctatctggaaggggcagagcccaggacagggctccatgtccacaggacggcgaggagcgaagaccatggggactgagtacacaggtaagagtgacagatgacggatgtggctgccggagtggacattgaggttttgggtgctgtctttcggggttcaggtgctggaggaggatgtcccccgtttctaaggctagtggacctggaagtcgaaagatttggagggtcaccttgggtcagagtggagctgggtttagttagggagggaccttgacttggccagagacacctaaccagataacctgactcaggtccttggtatatcactaagggcccatgggagagaacactacccgtaatattacccattatagcattacttctgggtactctgctgctgttgaaggaatagctcagcatttagatttttacccgtcagagccttgtcccatctatcactgtaggatttgggaagaaggcgagattcacagcttcacccagaaatgccgaggcattccagcctttctatggcttaatcacgttctagtcaataacggaagatatccccattccttgggcttctctccctcccctctggcctcccactccaataaagagaaagggggaggaagggctatttttagccatattgttctgtgcttgtttagtttcctgcatgctatagtaatagctaatgtttaatgagtgtttattatgtgccagacacagttctaagaccttttgggagtatcagcaccaaacttcacaacattatgaagtaggaactacttacctcttttttacagatgaagacacagaagcatagagaggataagtaatcactagcaagtggaagaaccgggattcagatccagaacaggctgactccagagtcactggctgtcatgtagtttcctcaactactgcctcaggtaggtttcttagccacttttgacaattaaagaaactgactctgaaagggttaaataactaaatagttcatatgccagaacctccactgagcaggtttggggtttttttcttaaaaagtttatgactctaagttcttaggtaaaatggagatggtaatattatatacctcacagtactgtcataaggattaaatgacctcatacatgtaaagcacttggtatagtccctgccatgtaatgtgttcatttttatcatcattatgataatcctttgagaaggcagtggaatttagatgaaagaaactagaattaattcagatactttatcctcttccttcctaattaaggaaacatggctcagtggagtcaagggactgcttcaacactgtagtttgtcacaaaacaaaatgagatcctaggcctcatgaggattttttcatttggttgtctgcaagtcacatggactctgttgtaacgaaaggaatgcctctctctggaaaagatggaattctccatggaatttgtcttatagaatgttcacaaatcctggccaactgcacagaggacttattttctgttattttctggtatatgagcaaataacttctgtgatagagtcagccagacctaggttggtgactaggttatttacaaatttgtgtgacttgtggaaaagacttgacttcccagagctttcttgtgtaaaatggtgacaatatacccgattctgtttgaagattttggagatttaaagacagtattaatatatgcagcacagacatggtggctcatgcttgtaatcccagcactgtgggaagccaaggcaggaggattgcttgaggccaggaggttgaccagatacctaactccaggaggttgacacctcctggcctcaagcaatatagtgagcaattgggcaatatagtgagacccccatctctatcaaaagtaaaaaaactagctgggcatggtggcacatgcctgtaatcttagctacttaggaggcctaagcaggaggatcccttgagcccagagtttgaagatacagtgagctatgatcacgtcactgtactccaacctgggcaacagagtgagtccctgtcttagaaaaaaaaaatgtacacacacacaggctagtattaataaatctgttgttaatgaattggtggctgatggggagagggggtcaagagatattatgctcatcctgaaaacccagagcagaggggaaccccagctatatatttcaagtctcccaaagagcatcaggactgtggggtgggggagttggagtgaggactgtgagtgaggacagaagaagctgaagggaagaaagcattttcagactttgattattagtgctacttggtttctcactacttctttttctccccagctctacaatcccagagtaaagctcttctccaaatgaagagccaggaagaggtagaggtggcaggaattaaactttgtaaagccatgtccctggtgagttagtattccccctctccccactaaaatagttttgcttttctggatttggtaatacttgttttcttctgaaaatattgtgcttaagagttccaccctgaggcctgtttcctgtttcttccctttctgatatgtgatggggttgtgagtgagggatagactcacacagcccagtgccctctcagaggttccttctctccttcctgctcattgtttatttttcattcaggaaatgacccagtctgagcccttcccttgtgctcagtcttttcataggcatctgacaaagcagaagtacaatcctcagaggaaatttccatgcctggttcctaagtctcagtcctgattctcagagaggttataatctgctggagaaatgaaaaggcagcaaacacttacgcagtgtgagaagtgctgcaagcagagagtagactcacagtggaatacttgggaagggccattaatagcccatatgatgtctttgggtgaattagaaaaaaaagtgccccttcctctctactgatgaagctctgtaacaggccgcacaatatggcaagaggaagtctaccgtattttagctccttcctgcctccttggtgagggatccttgagcaggatatagcctgcaccatcctactcactgctgagggcaggaagggttggggggacttcacagaggaagtgattcctgagttacgccttgaatgaaatggaggaagtgcaggcatatgggattgatggcattctgaacagagtatgcaaaggtttgttctccccatttgaccatggagccgtgaacatcttaaaatgccaaggaatgttttacatcctttcttctttctaggttgaataccataatctgtttagtcagtcccttgttgttccgtaggtaaattgttgacaattatctgctgttaatagagtgttgcagtaattattcttgtagttgaatttttgccctcatctctgattattttctttgactaaattcctagtttttcattccttgtggattaaagtttctcaaactgaccctaccctagaacattttaaattttattatttttatggccaacaatagaagcttcagagctacagttcatgttctgattaagataaactgttaatctagtttcaccagcaaattgcttattgtaagaaagtattgaatttggtttacaaacttagaaaattaaaatttttaaaatggagtagttaagttttctttttgttttttgtcttttttttttttgagatggagtctcactctgttgcccaggccagagtgcagtagtgcaatcttggctcactgcaacctccacctcccaggttcaaatgattcttctgcctcagcctcccaagtagctgggattacaggcctgtgccaccacacctggctaatttttttttttttttttttttaagtagagatggggtttcaccatgttggccaggctagtctcaaactcctgacctcaagtgatctgccagctttggcctcccaaagttctggtattccaggtgtgagccactgtgcctggcaaaaattttttttttataataggcataacaacttatggccagagcatgacaccttttcttaggtataatgccatgaaacatacactaccaaggtaacttgtttcttagcgcatttggacattttaaacaaaagcattcatgtcagttgccagaggaaaatattttaagagtggcagaatttgtcataaaggttaagatggactatgcacactccactctttttcccagtgaaagttgctataaaaccaggacagcatgcctggaacagcaatctgaggtctctgtaaagtaaatagtagcaggcagactggacacagtgactcacacctgtgatcccagcactttgggaggctgaggcgggtggattacctgaggccaggagttcaagaccagcctggccaacatggtgaaaccctgtctctacaaaaaaaaaaaaaaaaaaaaaaaaaaaaaaaatatatatatatatatataaattagccaggtgtggtggtgcatgcctgtaatcccagctattcaagaggctgaggcatgagaatcacttgaacctgggaggtggaggttgccgtgagccaagattgtaccactgcactccagtctgggcaacagaacaagaccctgtctcaaaaaaaaaaaaaaaaaaagtagcagtcagattggggaaaaagccccagatttgaagtaccaccagaccatggtgcgtttaccttcaagagactcaaaacctgcaagtgggtaatgatgtggacagaaagagctgcaggagaagccttctagttgataatcaaactgctgaaaactaaagacaaaaaaatctcaaaaaccagccactgaaaaacgatgaagaactgtcaacctagaatactatgtccagggaaagtagcccttaggaatgcagataaaataaagttactcataggaaagaaaactaagaacattcactgccagaattctgcaagaatcactaaagggagttcttcagatagaaattataccagaagggaacttggagcatcagggtgaaggaagtgcaacagaaatgggaaatattatatgtaaatacaatagactgttctcttgagtttataaaaatatcttcaatggttaaaaacaaagctgatagcttaactaaacagaacagtattttaatataggtaatctagattcagagaccatgtctaaactattgtagcatactacagttaggtaaaataagatgtaagaattatgattgaaatactaaatgaaatgtttcacctgttcttcttggccttctcttcttctctctctgttttttcccttctgtccttcttcatccttatcataggcaacaattcttaagcaattacatcatgccaggcattttagatctgtttcttcatttaattttcacggtgctgccatgaagcaagtactatatttccatttttcagatgggaaaactgaggcacagggaagttaaatttggccaacctcacccagctagtcagtactacagaccaaattcattggagtaatctgaccttttttctgatttattcaaaactggtatttatttaaaagtctgatgttgatataagtgaagtcataaaaaaattgaaaatctcccagtaacagtccagtggatcactttgtgggttggttaggaaatggagctcatgtaacaaaacacaggttgcttgatatgtgctcacatcacattatttctcctgataatttcccattagattatcaaaaaacaacttttgggcatgttggctcaggcctataatcccaactctttgggaggctgaggtgggaggattgtgagaggccaggagtttgagatcagcctgggcaatatagtaagaccctgtctctacaaaatgaagaagtaaataaaaaaggaaaatgaaaaacaacttttcaaatgtgttcttctctcctaatacaaatatacttttatttcagaagaaaagactatagctaggtgtttttttcctttcattttttaggcatacctcttaacatctcaagaacactaagatttcttagaaaatattgtggagattgaaatcatgttcatcaggtcagcatccttccttgcaagtttttctcacagttccagagctctttagcttctccatgtagagaagtgatttagctcctaacatgaatagcattgcgttagcacttgattatatcctgttttgaatgtagtcagcattttttcattggtaatgtattctcgccacctagaattgcaaatgtttgaagagcaaggagtatctcatttttttctttttcctaatatgtacagcataactaggcagaaaagttgtccaataacttacctgacccggatcatttagacccttagtgcagttacttatacatagtgtttttaatcccaaagtgagaacagcataactctttaccctagagctgcattggaatgtgaacactgagtgagcaagatcatatttgtgtcattttagggttcagtgactttcacagatgtggccatagacttttcccaagatgaatgggagtggctgaatcttgctcagagaagtttgtacaagaaggtgatgttagaaaactacaggaacctagtttcagtgggtaagagtatcttcctcctgttgcctccccatgactcagtagtcttttatgccattatcagaatttcccatagttttccacagcataggcaatttttatatgtctttttacatgcaggtctttgcatttctaaaccagatgtgatctccttactggagcaagagaaagacccttgggtgataaaaggagggatgaacagaggcctgtgcccaggtaagtggaggatacctagagataaaggaactgttctcaacatgttcttgtctctgaagtgtgttggaaaacacctctcaaactccctcccaaactgaaacttgttcttctaacaccagtttttgaatggttattctcttccctactagtgtaacttgcctcctttacctttattgatttcttatgcataccagggtctatttctgagctcttgttttactgatgtttacctaattctactcaagcaccatattgttgtcatcatccctgacttcaaacatttctgaatcctttagacaagctgatgtttagttttttgaactggtttaaatattttcctttccttaaaaggtgagtttattgagttaacatgtattacagctattttcttccctctgcctttttcttttttgtatttcttgtgttatttattcttgttttgttgtttattaggtctgtttttttctcactctcttctttataccaccccaccctttgaattagaaaagtttttagttctacaagttgttacctttatgtatttatatattttaagatcttttagaatttttctgcttggtattccaaacattgtcttctgatacccttacaaaagatgaagaaattagctcatgaatattactttctttccctgtgtacatcatttccccacttatattgtgctcactgggatttttgacgcagggtatttcattcaattttttttttttttttttaattttcttgccttgctttgtagctgttttactgatttagaaagctagataagagacgacagaaatatattgcaagaaaatgaacctcaaatgagatggtcctggtttaatctgtggcctgaagcgtagacttttcctactttcagttcttcattttattttattttattttactttttaaaattagagacaggatcttgctatgttacccaggctggagttgaacttttgggctcaagcaatactcccaccacagcttcttgagtagctaggactacaggaatgcatcaccacacctggccctactttcagttcttatagtttcaacaagaggattgtgggttacttgtggtcctatgtacattaataaataagaaataatgaaaatcagtaagcatctgattcacaatattagaaaaagaacaaaatgaatttaaggaaagcccagataagttatatgtagtgatttatacgtctacaaataaaagtaggaataaatgaattagaaacagtagcgctactgaaaataaagtattgtacatacttcattagaaaaccaacacagtatataaactaaggacaaatgagagaaaacacaaaaacaaaataattataaataaccacacatgcataagaacttaaaagaatcatgtgaatctattttcctcaactctccataaaataatttgaaaaaatagatgatattctagaagaatataataatgtaggttaccataactgataccaagaggagatacaacatttaaacaagtaagttaccatcagagaaatgtagaatgttgtataggaactgcctcccccaagaaaagaagccacatccccgaatagttctttaaggaaaaatatcatcaatgttgtttaaattgttctgggatagagaataaaaagagagcttaaaacatttttgtttatgaatacagcatatccgatgataccaaaattaccaaaatagcaccaaaaagagaaattagagacaaacctcaattatcaatattggttcaaaatcttaaaaggtcatattgaaatagtataccatggccaaggaggatttattacagcagtgcaaggatggttgtatcacctaatcttatgtaagaaccataaaaacatgtacctctgcttgtgggtttcaataactatgtgattcacattttcattttcgaaatttccattattctagcatttaataaaggagacatttactttcttaatatctttcagacttggagtgtgtgtgggtgaccaaatcattatctttaaaccaggatatttatgaagaaaaattacccccggcaatcataatggaaagacttaaaagctatgaccttgaatgttcaacattagggaaaaactggaaatgtgaagacttgtttgagagggagcttgtaaaccagaagacacattttaggcaagagaccatcactcatatagatactcttattgaaaaaagagatcactctaacaaatctgggacagtttttcatctgaatacattatcttatataaaacagatttttcccatggaagagagaatatttaattttcatacagataagaaaagcttaaaaacacattcagttgtgaaaaaacacaagcaagaccgtggagaaaagaaacttttaaaatgtaatgactgtgagaaaatattcagcaaaatctcaacccttactcttcaccaaagaattcatacaggagagaaaccctatgaatgtattgaatgtggaaaggcctttagccagagtgcccaccttgctcaacatcagagaatacacacaggagaaaaaccttttgaatgtactgaatgtgggaaagccttcagccagaatgctcatcttgttcaacaccagagagttcatactggagagaaaccttatcagtgtaagcagtgtaataaagcattcagccagcttgcacaccttgctcaacatcagagggtccacactggagagaaaccctatgaatgtattgaatgtgggaaggcttttagtgattgctcatccctagctcatcatcgaaggattcacactgggaaaagaccttatgaatgtattgactgtgggaaagctttcaggcagaatgcttctcttatacgtcatcggcgatattatcatactggagagaaaccctttgactgtattgattgtgggaaggctttcactgatcacataggacttattcagcataagagaactcatactggagagagaccttacaaatgtaatgtgtgtgggaaggcttttagccatggctcatctctgacagtacatcagagaattcatacaggagagaaaccttatgaatgcaatatctgtgagaaagccttcagccatcgtgggtctcttactcttcatcagagagttcatactggagagaaaccctatgaatgtaaagaatgtgggaaagctttccggcagagcacgcatctggctcatcatcagagaattcatactggagagaaaccttatgaatgtaaggaatgcagcaaaaccttcagccagaatgcacacctcgcgcaacatcagaaaatacacactggggagaaaccttatgaatgtaaggaatgtggtaaggccttcagtcagattgcacaccttgttcagcaccagagagttcatactggtgagaagccttacgaatgtattgaatgtgggaaggcctttagtgatggctcatatcttgttcaacatcagagactccacagtggcaaaagaccgtatgaatgtcttgaatgtgggaaggcattcaggcagagggcatccttgatttgtcatcagagatgtcatactggtgagaaaccttatgaatgtaatgtttgtgggaaagcctttagccatcgtaaatcccttactctgcatcagagaattcatacaggagagaaaccttatgagtgtaaggaatgtagcaaagccttcagccaggttgcccatcttactctacataagagaattcatactggagaaaggccctatgagtgtaaagaatgtggaaaagccttcaggcagagtgtacatcttgctcatcatcagcgaattcataccggagagtcatcagttattctctcctctgccctcccataccaccaagtcctatagattcaatctcgtaaatgcttctagcatccatctgcttttttccagcacatgtcccatcatcatagtccaagacgcaaccatctcatctggatttctgcagtagcataactgttgccccttttgcttctatcaactacatgtttaacactgtaggcagcctaaccttttaaaaataaaaatacataatttatgttattttcccatttaaaacacttgatttgaaaaatatattaactaatccatttcaaggatttagcacacactggcatatagttattgctaaataaatgctagccattaaggtaaaggtttccttacaaactatcatattaagcagcaagtaaaccaaacagtaagtctaagactaagattttagagcagacagaagactactctcctggtagagaggaaagatgaacaaactcagaattgaaagatttatggtacacaaggtaacatggtggcttatcactccctctgtgacattgttgatgagcaactctcactttacctgacactgagaagtgagaatcagccaattagaacaaaagcttttagctgggtgcggtggctcatgcctgtagtcccagcactttgggaggctgaggcaggcagattgcttgagctcaggagttcgagaccaacctgagcaacatggtgaaaccctgtctctacaaaaaatacagaaattagccaggcgtggtggtgcacacctgtagtcctagctactcaggaggctgaagcaggaggattgcttgagcccaggaggtagaggttgcagtgagtcatgatcacaccactgcaattccagctgggcagcagagccagacactgtctcaaggaaaaacaaagaacaaaagcatttggtagaatgtaggactaaccagggtaggtagtagtaaaccaaaagtaacaagccaaaaaaacttgaatagattaatagccatgaaacactgaaaagggtagttcaatactttggcctttataaaagtaccacagacaattcgtgtggtatttaaattgttctagcataaaataaaatgcaataagaccttccatcttgttccatgagattgacaagacatgccaaaacataaaaatatgtacactgcaattagtttctgaatgtagatgttacaacttaaacttatttttaaaatatttaaaaataggaaggctagacatgcctctgtatagaaaatctgataaaaatatttctccctaaattgtaaattcattgatattccagtaaaaatttccatatttttttagttgagaagctgattctgatcatctgtagaattttgattttaacgaggaatgtagtttacattaggaatgtagtactaatactaattgaacatttgctaatgtttcacacactattttaggtgctgggggatacagtaaggtacaagatggacaaaaatacgtgctcttacagatctagtagaacagaaaaaattaaatgcatgctatgtgataagtatatgatatgtcccataaagagaaatgatataaaaaagaagctagggagtgctggatcaggcaccttactatccccagaacatgttggtattagaggatgagggaagaactagaggtaactgtgagacacaaaaggcataatgaaaatagtcatgatagtcccaaggcagatattgtttatgatgctttgagtgttggaggaagggaggattgatggtttaacagagatcatggcagttatgttcactcatataaatgttgatttagaagctggtggaagggtattttttgagtgacagctttattgagacaaagcaattctggagaacacccatatccttctctctgtatccatcagcagaagtgaagagggagccccaaagttccacttaaagtgtacaacttatggcttttagttcattcacggagttgtgcaaccatcaccaccatcaattttagaacattttcatcacctcaaagaggaatcccttgtccttttgtagttatggccatccctggaagagtacttttttttttttttcaactgaagcacccagagctcttgggttccctcttaactgctttctgtggaagtatagagggccatgtgagggaagccgttatccagagtacatgactgctagaaaatggagtttggggctccctcttcacttctgctgatagaagcataatggctaggggatgggtagtctcaccagagaatgtggagctttcagactctccttatatatgataaaaaggatttttcattgtagtggggaaaaggtggtttgatcaaatggcattgggaaacttagctcactggaaaaacagatctgtacctttcacactaatgaaatgcctgagatattaaaggtctaaatgtaaaattaaagtacatgaaaaacagaataatatatatgtaccctcggtttgaaatagactttaagcactaatgcataaccccaaagctgacattaggcttttatatggtggaaaacatcatagtcaatagataaatgagagactgacacaaagtgtttgcaacagatataataaaggactgtaattcgtgatattcaaagtactattacaaaccaataataatctgcaacttagaaaaatggactaatgtcccattcacaaaagatgcaataaaagcagttaatgaaaattatccaatatcactagaaatcaagaaatgcaaattaaagtgattatctactttttccccaaaagactgactaatcgagtgataacattcagtattggtgaatgtgtggaaacaagggaattccattgttgattacatatctattgctttatgtatataccctttgaattaatattccttggaaaccaacatatacaaaggtagataaatgtattagtggcaaaaaaattaatggtaaactattaaaacaacaagtgtccatcagggtaataaataaattaattatggtatatatccattcaataggaattatgcagctgttgaaaaaaaatcaatgtgtgtagtcatagaaagatagctgtgctatactaaatgaaaaattgcagacctgtattgtagtataggcccataattgtgatatcaaaaataaaaatcaaaatatatattatagtaggcatttgtttttctctgcccagtttcccttgcctcctccttttggctgcactatctcatcttttccttttgagtaactggccataccctaccatatgtttttgatggacgtggccaataaaattgtctctgaatttcaaaaggcatttggatctgtgtcatccaatggcaactccctaaaagctgatgcagttattcttttgattggtccttggaaccaccctggtttttgtactttccaagtctgtgattcctcaaactacccattgtctttccggtacttgatttttgcctcctgttggtcagttgcttgcaagtaaagaaacaatcatacagaatttggtacgaagattgggtaatgggcattagaatctttggaaaaatcaggtattgggagttgctttttggatgagatggggcgaataagacttatattctagactggaaagcatctcatggtgtgcgatgagcaaacgcctgattattcattatagtcacctgggatgaatagaggtctagggttctggataatgataatttaaggaggatggagaatgctgaatccaaaaggtatatgtaatactggtatctaactgcttggaataacttaaagtttagctcttgaatttctagcattaaggcaaaaaaaattcacctaagggattttgtatgatattgttgaaagatgtcttacattgtttaaagtcatagggttaagatggctcataaccaaatttagagactatttttatgcattgttaaagtggaatgctggttaaattttatactttattcacaagagtcactgtgaattgaattgtgaattcagttctgaattgtgttcccaccagcaccaccaaatgctggcctctaccaccaccaaatttacttgttgaagtcctaaaccccaacatgactgtatttggacataaggcctttaagaaactaaggttaagttaggccataagagtgaggccctaatcccataggactagtgtccttataagaggaagagacaccagaggtttgtctctccacatgtgcacagaggaaatgctgtgtaaggacacaacaagaatgctgccatctgcaagccaggaggagagacctcaccaggaaccagccctgccagcaccttgatcttggacttttaatctccaggactgtgagaaaataaatgttggttgtttaagccacccagtctgtggtatattgttacggcagcctgaactgattaatgcaattaccatataatttattgttcaaactgggacatttttgagagtgaaaggagtagctaactgcacagggcacttgacaacaggtgttcatatcctcagcaaagcaggatatatggtcatacttcttgtgtaacagaatattgaacagaaaaaaatatagctctactattggaaaggtgatattggagatgagccaaaggattggaatatactgaacttccggattcgtgtgatataccacctattaacatctgtttgcataggtacatatggctgttctgaagagacagctaacagttcatcttattcccccattccattgttgctcacatggaataacaaagtgaatttaacatgaccataacattaaatgcaaaaatcaggctgagcacagtggctcatgcctgtaatcctagcactttgggaggcccaggcaggaggatcatttgagaccagcctgggcaatgtagcatgaccctatcccatatctaaaaaaaaattaaattttccagtcatggtggcacctagctactcgggaggctgaggtgggaggattgcttgagcccaggagttcgaggctgcagtgagccatgatcacaccattgcaatccagcttgggtgacaaagccagaccctgtttgaaaaatagataaataaaatcatacatatgtacaaaattaaaatagggcaaagagtaactgtatcttagaagaattttcggcagttagtttactagtgtagattaagaaaaatctagggcatttgtggaagtgaaatttgaggaggctgaatatattgacaaagtagcttgagtagcctgccatggttctaagaatttgttgaactcatccatgtaccaaatgctggccgctaataaattacattataaggccagaaatctcttaacataatgtaaaggatgttgttcagacttcaaaaggcaggattgctggattggttcttgtgttgcaacatcaggtctcctgacaagagtccagaaacctatacattcattcttcccgtgagaaaaacaccatttgtctaatggattttaaaaccattacaccgactctctggcagatcaagaatgctatgtagagaggttgtaactgaaggagcatctctgatcaaaagactaattgaaatgggaatgacaccaaactgccccaccaggtgagcctcctctgggactaatgtgacttcagagagagcctttaactcagcatggcctgagagtccttgggcagattggggccttggggaggttttttggggctcctggtggcagaagcaaagaacaatttaaaaataaggtttaaaaaattctacctacaatagcatcaaaaggaattaaatacttaggaatcaacaaaagtacaaaagttagattctgaaaactataaaatattgttgaaagaaaatcccatatttatgcattggaaggcttaatattattaagatggcaatgcttcccaacattatctacatgttcaatgcaatctaatttcctttttgtgggaattgataagctgatcctaaaattcatatggaagcacaagggactcagaatagccaaaacaatatttaaaaagcaaaacaaagctggagagtcacactttccaattttaaatcaaaactgtagtaaccaagactatgcagtactggcataaggatagttatagagatcaatggaatagaaattaaggtccagaaataaacccatacatttatgctcaattgattttcaacaaggatgtcaaaacaatttaatgtgggataagaagagttgtttcagccgggcgcggtgactcacgcctgtgatcctagaactttgggaggctgaggcaggtggattgcctgagctcaggagtttgagaccagcctggagaatatggtgaaacccagtctctactaaaaatgcaaaaaattagccggctgtggtggcgtgcacctgtaatcccagctactcgggaggctgagacaggagaattgcttgaactcgggaggcagaggttgcagtgagccgagatcgcgccattgcactccagcctgggtgacagagtgagactctgtctcaaaaaaaaaaaaaaaggaaagtcatttcaacaaataatggtgggatcactggatatctacttgcaaaagaatgaatttggggctgggcgcagtggctcacgcctgtaatcccagcactttgagaggccgtggcgggcggatcatgaggtcagattgagaccatcctggctaacacggtgaaattccgtctctactaaaaatacaaaaaattggccgggtgtagtggtgcgtgcctgtaataccagctactcgggaggctgaggcaggagaatggcatgaacctgggaggcagagcttgcagtgagccaagattgtgccgctgcattccagcctgggcgacagagcaagactgtctcaaaaaaaaaaaaaaaaaaaagaaagattgaatttggacccctacctcacactatatatgaaaatgaatgcaaatagatcaaatatctaaatgcaataaccgaaatcgtaaaactcttagaagaaacatagtggtatatattcatgaccttggatttggaaatagtttcatagatataactgtcaaagtacaagcaacaaaagcaaaacaagttggactattatcagaattaaaaacatctatgcttcaaggctgggcatggtacctcatgcctgtaatcccaggaatttgggaggctaaggtgagaggatcacttgaggaaaagtttgagactagcctgggcaacatagtgagatctagtctctacaaaaaaaaaaaaattaatagatgagttggtgcatgcctgtaatcccagctactcgagaggctgaggtgagaagattgcttgagcctgggagatcaaggcttcagtgagctgtgatcgcaccaccacacatcagcccaggtgacagagcaagacactgtcttaaaaacaaaaaaacaaaaaaatctatgcttcagaagacaccatcgagaaagtgaaacaattcacaaaatgagagaagatatttgcaaatcatttatctgtaaaggacatgaatccagaattacaacttaacaataacaagacaaataacccaattaaaaataggcaaaaggtttgaatagacatttatccaaagaaaatatatgaatgaaaaacaagtatatgaaaagatgctcaacatcactcgccattagggaaatgtgtatcaaaaccacgatgatctgccccctgaaagggccagacaggggaaggaatgctgcggtggggttttgtcatcctgaggatggataggtgacagagccttcccaatgttctcactctccaatgacagctggaaatgcagtgttttgttttgtgaaaatgaaggcagatgagtcatgagaagaatgggctaaaaatcctgtaacgtgtgcgcacatatttattccatctttattttgttctaacaaaacaccttgtataaaggaaccagccacgtattcctttgttcccactgaaagagttttttctttattaaaaagaagtgcacacatattgatctactttaagcacacacacatcgatctttacattcaatgtaattcaaaaaaaatcaaagtaagatttttaattgacgattgtagactgattctgttaccacaactggactgggagttctttggctctcatgtaagtagaaattaacatcatgccaaacagaaattttctcaggcaaggtttaagaggcttgaagctcaagctatgcaaagtcacttccacatttttcggtatcttttcagcagcaccccactctactggtaccaatttactgtattagtctgttttcatgctgctgataaaggcatacccaagactggggagaaaaagaggtttaattagatttacagtaccacatggctgaggagacctcagaatcatggtgggaggtgaaaggcacttcttacatggtggcggcaagagaaaatgtgaaagaagcaaaagcggaacccccgataaacccatcagttcttgtgagacttattcactatcacgagaatagcatgggaaagaccatgccccatgattcagttacctccctctgggtccttcccacaacacgtgggaatcctgggaggtacaattcaagttgagctttggttggggacacagccaaaccatatcactatcctttgggaaacataaagttaggttgccaactttatagcacttcccagtttaaattgtaggaggacaagttcccttttttttttttttgagatggagtctcgctctgtcacccaggctggagtgcagtggcgcgatctcagctcactgcaagccccacctcccgggttcatgccattctcctgcctcagccttccgagtagctgggactacaggcgcccaccaccatgcccggctaattttttgtatttttagtagagatggggtttcactgtgtaagccaggatggtctcgatctccttgccttatgatccacccacctcgccctcccaaagtgctgggattacaggcgtgagccaccaggcctggccgacaagttcccatttcttactaaagagaagtcttggcaataactgaacaatgtctctggcagtttaccccagaaggacaaactttgacttttacaggaagctggccaggagtgacataggagccatctgttaagttgaaggaattgacatttctagatcacggtggaaaaactcccaccacccacccaatgtggccttcacactgacatgtttgttgtgttccttgtatccaaggagcctggaactcagaatgcatgtacctcatggaacattaaggaacagtcttcataagggcataagggctgctgtccttgtgactaagcactattaatacagtgcccaaacagggacagtctgagttacacgcaatttagagtcactcaaattgatccctcagtttttgattaatagcatattggtgttttaaataaagtattttcagaagagtacaaagggctttaattaaatctgagtaattttaaaggaaatatatgatcaaaaaagaggaaaaatgtgcctcaaaatagacataaatggcttaaatgaatgctaaaactgaaaatcaaaataatttagaatgcacatactaatttggaaacaggtaaaacagacataagagttttatttgtagggggagggtctgtaaagttaattatgtgaacttctgcgttgtaactatgtatttttacaatctactctttgactatttccttctttggggaacaatgatttagatatcctgaaaatgccacatcagtaagttgaacaagaagaacgggagctttaagaacaagattcaagatgaaacaacacaagtgttgaatattttataaatagctaaaggcagaaaacgttgccaattatctcagacttccagaaagtgaaaacaaacaaacaaacaaactaaagtcttaattgaaaagaagaaagaaagacatgaagaaagaaatagagaatgcatgttgagagtggggacaggtaagtaccagctggactcttaccctgggctgttggtcctgaggatgcggtataggttcagcctaggcactggctccaccccttgaaatagtttggatatttgtccctgcccaaaatctcatgttagattgtaatccccagtgctggagatggggcctggtgggaggtgtttggatcatggggcaggtccctcatggcacggtgctgtcttctcgataatgagtgagttcttgtgagattaggtcctttaaaaatgtgtggcacatttcgccccttctgtcttgctcatgtgtttttgccatgtgatgtgcggctcccctttcaccttttgccatgattgtaagcctcctgtggcctccccagaagtcaagcaaatgccaatgtcatgtttgctgtacagcctgcagaactgtgagccaattaaacctcttttccttataaattaccaggtatttctttacagtaatgcaagaatggcctaatacactcctcaaggacctcatctctgagagatcacacagttcttaaatcagaggggcagttcgttgctgaatccaggaagacaggccccaggtccaggttctggaatgagtcctggaggcagtaaagggtctgcttgcctggtggggaatattcagagggcatcactgaggagggggcccactctctgagcaggtgaggaccagcagccagagctcccaccagcccacaggggcaaggagggaggccaccttgggcaaaggagatgaaggaaaaggaggtgagggtgctgaatgaaggctgcggtcctgtcctctgcctcacccccaaaacccagaggtcagcctccagcccctcacactccacagagaggccttgggaggcttgatggaaacccactgagtactgagctccaggtcccaggagagcttatagccacccccaagtcaccaccacctgctgctctggtaggggccctggcttctgcctccaggaacccctaacaagcctcctcaaggcccccaacaacctgcgcaaggactctcgggaaatgctgagttaaaggctctctgaggtcacactagtcccagaggaggctcacctgtcaggggaggttggtgccatggtctggaggctctgggttgaggatgagcattggagttgtggggcccagggaggccaggcaagcccccattcaggaggaggtagagactgaacccccctcacagacccaggaaacaaagaccaccatccttgggtgtccaagttccgggatctctggatcacggacattcagctgctggctcagaggcgggaggagagaggggcagagaccagaactcagagaggacttcaggggatcccccaagactgcccccttttcaaatctgagcctgctcctgcccgctcactgggagaggtgagagggtcccattccagctcagctcgtggagtgagaggcccacactccatcccttgtgccctccctagaaccaattccgtacctggcacatgcactgacagcccgttaattcagtcacatcatctgacagtaggtcctctctttacctgaacgtagcacctccctgtatcccccatctaggcatctctgatgctcagggagcagttataggtttgggggtgccccaggaaggcaaatgggctctgggtctcctcctacattttgtggggagggtcattgtggccactggatcattcaaattaaaaacgtggactcggcacccctgagctggaaaaacgtcagacaggacattctgggggaggttagaggcacagggcatcaggacacacaggccctcctgcacctacactgaattccttcactcacagctggaatcgtggatcctgagccaggcactctggaagaaacatctggggaggaatagctgtggttggttccaaaggaccaacaacctggggccccaacaacccctcccttctgaacctcccttgggatcactcacactccctgcatccccacacacacataaagcagaggccacagcagcagctcagtggcatctctatgctggagaaccaggcccacccccataccatccagttcctcttttggggaagaaagaggaaaagccccactggaagccactgggaagggtcaggatggcgattgaacccagaagggaaacttcagatacacagtccttggaaatcaaagaagatctaaataaattgagagagattccatgttcatgggtaggatgacttggtattgttcagatgtcagtgcttcctaactaatctatagactcaaccaatcccaatcaaaatcccagcaagttattctgtggatattgagaaagtgattataaagtttatatgaaaagacaaacatgctcagaatagccaacacaatactagagaagaacagagttggagagcggatactactcgacttcaagacagagctattgtaatcaagacagtgtagtgttgcctaaagaatagagaaggagcaatggaccagaatagagatcccagaaatagaaccacatgaatatagtcagctgatctttgtcaaagaagcaaaggcaacttaatggggaaagaacagtcttttcaacaaacagtgctggaacaatgggatgtccacatggaaaaaacagacacatttttcacaaaattaacttaaaatggatcatagatttaaatgtaaaaatgcaaaattataaaactcctagaaagtaacaggagaaaatctaggtgacctttggtttagcaatgagtttttaaatacaagattgaaaagcacaatccaaaataatttaaaaaaagaaaaaaaaagcacaatacatgaaagaaaaaaatttataagttgttcattaaaattaaaaactactctgtgggccgggtgcagtggctcacacctgtagtcccagaactttgggaggctggaggcgggtggattacctgaggccaggagttcgagaccagcctggccaacatggtgaaaccctatctctactaaaaatacaaaaaattagccaggtgtggtagcaggtgcctgtaatcccagctactcgggaggctgaggtgaaagaatcgcttgaacccgggaggtggaggttgcagtgagttgagatcgtgccactgcacttcagcctgagcgacagagggagactctgtctcaaaacacaacaaaacaaaaaacaaacaaaaacttctctgtgaaaaaatactgttagacttaaaagacaaaccaccattgggaggacatgttttcaaaacacatagctgctaaaggacttacatacaaaatatacaaagatctcataaaactcaacaataagaaagcaatgcacttgaaaaatgggcaaaagatctaacaaaaactgcaaagaggatatacagatggtaaataagcatggaaaaagatgcttaccatcatattaccatcatatgtcattagggaattgcaaattaaagcaacaagatatgactacacacttattagaatgactaaaatccaaaaagaactttcaatatcaaatggtggcaagattgtggacagcagttctcattcattgctgtgggtatgcactttggaaaacagtttggtgatttcttacaaagctaaacatacccttgccatatgatctagcaatcacactcctgggtatctggctaggatttggaaaaactgctctcataaattgatgccaggaatgtaaaatggtacagccactctggaaaacagtttgacagtttgttaagaagaaaactaaacatactatatgacctagtaattacattactgagcatttatcccagagaaatgaagagttatgttcacacaaaatcctgtaataagaaaacaattaccagtgggaagaggcagcttactaattgggaggaaatatttgcaaaccatatatctgataaggggttaatattcaaaatatataaggaactccttcagctcaattacactaaaaaacaaattacccgatttaaaaatgggcaaatgacttaagtagacattttcccaaagaagacatatagatagccaacaagtatatgaaatgatgctcaaacatcactgattatcagggaaatgcaaatcaaaaccacagcaagatattacttcatcccagttacaatggctattctcaaaaaaaaacaaacaaacataacgtgttaggctgtggagaaattggaacccttgtttactgttggtgggaatgcaaagtagtggtgcttcttggaaaacagtttggagattcctcaagaaattagaagtagaactaccatatattcctgcaatccccatctgggtatatggccaaggaattgaaactaggatctcaaggagatctccaggaggttgcaatgaataatgcacttccatgttcattacagcattatttacaatagccaagagatgaagacaatgtacatgtccattgacagatggacagataaaaaaagtgacacacacagacacatacacacacaatggcatatttttaagccctagaaaaagaaatcctgtcatatgcgacaacatggataaactttgagtacattatgctaagtaaaagaagccagtcacaggacaaatactttatgattccacttacatgtggaatctaaaatagtcaacctcatagaaacagaaattagaatggtggtttccaggggctgggggaggtgagaagacgttactcaacgagtataaagtttctgttatgcaagataattaagttctctctatacagcaacttgaatatatctccagagaattgtgctgaatgaaaaaagccaattccaccattcacatactgtatgattccatttgtataacattcttgaaatgacacaattgtatatatggaggatagactaatgatcgagtctggaggaaagtgagtgtggctataaaagggcaagatgaaggatccttgtggaaatatcggaagagatccttgtgatggaaatgttctgtctcttgaatggaccgacgtcagtatcctacttgtgatattgcaagatgttgcccttgggtgaaattacctaagagacataggtctctctgtatgatttctatattatgttttacaacctgacgtgaataaatccacatttatctcagaataaaatatttcatttaaatacatcattaatcaccacctaaggctagctgctgttgatggttttgtggccacttggacattcagcaaatgtttttaaacttggctttgtggtttactatagaaaagggtctcagccaggcatctggttcctacctttcctcttgtgtaagctcccctgtctgtattacccaactaatctggaaagtagcttggctgtgaagattgtttataaatcataaaatgtggagaccaggggtcagaacaaaggaaactcacaacaaggattaatgctttttttcttatatctaaagatatagggaattgacatttaaagatctagttgttttttatttgcaattctagaatccagccacacctccttctataaaatagaactagtgttctggtgatccaagcagaggaatatggcttcatacacagaaacgggctgaggaaagcagaaacagagaacaagagtggatgggtcatttcaaagttactttccctatcatggttaaagcaaaggggatttcttttatcatgcctgctaaactggcctgtttgggacttggctattatctctctctttctctcctgagaggaggtcaggtaacaacttagttggagttggtggcctggaacttcagcatgagtagctccatttcgatttgatctgttgggcctagtgcaggaactcagtccaaaccgatagtctcctatacattttattctacacctatgctcattttcttctttgcacatctgtatgcttaaaaagtgttctttaaagataagcatgattatcaggtttaaagttgcctgggatggtccctcaggccagtccattggctggactgcagaaatgtctgcagcagatgtgacacgcctcttttatccccctcatttctctgcctccacccatcccttgtccttttctgttttccttcctccctcctccctctccttacccattctttcctctcttcagcctgtcctgccctccccaactcgacttcctctttctttcctccttttcccacccttttcttcttccttatagtcctttccaccttctcatccccctttccaccctttcttccttctcctccttgccgtctccattctcttcctttcctgcctccctgcccctccctcctcccacccgctccctcttctttctgttggttcctctcctctctgacctgttcttttcccttagtctctccccagcccttcctccttcccctccatccttcttccaacccctcctccttctccatctcttcttcttcctccccagctctcctccccaagtccctctccatcctctctcttctccccgctcctccccatccctcctccccttccatccttcttcccacctctcctacttcttttctccctcctccccccttccctcctgtccctcctcctcgcccctcctttccctccgtctttctttccacccttcctccctccgtctcttctctctccttccctttccctgcctcctccccctcaatcctccctctcgccccagcctccttggccgcggagtcctctgtgagatggaggagctcagttggctccgctcggctccactcggctgggctcggctgaaaaaagccggggggaggtggcgcgcgcgggtttctgggaagcgtagtccggcgcagtccgcgcaggcgcactgccgtcgggcgggcctagcgggcgcggtcattgtcctggcagagcggcgagccggtgagtgtggctgcggggtcgcgcccaccctctacctgtgccgggggccggaacctggccccggggagggcgcggcctcggggagacggcgtgcaggcccaggtacggggagtgcagggctgggtgctggtccagggcgtgcgggcgcaggagagggcgtgcaggccgggaccgaggtgcgcctggagaggctgagcggccgaggagaggctgaggggaagctgaggggctaaggagaggctgactggaggctgaggggctgaggagaggccggggccagggagggagaggcgtgagtgggttggaggtaggaaagttgcatgaacacgagggccatcctggggggaaggtggcctgtgtgagagacaggcagtgcatatcatcctgaggatgaggctgtgtctttgtggatattgtgaatgtgtctgtgtgtgtgtctgtgtgggtctgtatgtgtgtgtgagacagattgtgtcgtcctgagggtatggctgtgtctctggatattgtgattgtgtgtgtgtgtttgtgtgtgtgtgtgtgtgtgtgtgtgtgtgtgtgtatgagacagagagagaaactgcgtgtcgtccagaggctgggtctgtgaatgaatgtgaatgtgtccatgtatgtccgtgtgggtcatgtgtggtagcgtgtgtgtgtgtgtgtcccacttcttcagagtcttggtctctctgtggagctgtgtctctccaggtctctgcctatgcatgtgtggtgatatctctgagtgactgcctgtgtccttgtctttggtgttgtgggtgtgtcagccttgatctctgtccatgagtgtctctgtgggagggtgccctctgggtgtccactatgtctgctctttccatgcatgtctcttggcatgagtgtagggctgtgtctttccaggggccagtcctgtctggatctttcctatctctgtgtgtccacctgtgtctagagtatttcttgatgtttgcgtgtgactctgcaggggtgggtgcgtctgggtgtgcctcttccaaagactatatgcctggacaagggagcctagcagagccactaccttctcaccctacgcttctcctagtctgcctgcccacagttccctggctttttcctgcccatagaaggctctggaggcgtaggggcctgggagtgacaggggccgggtggaggaggggaaaaggaaggctgtttcttctgcctcccacaggatcttcttaaagtgggatcagactcccaaagggtctctgtgccctactctgttctgaccaaggagaggttgatttgttcagggaatgtgtatgcagccagtgctggccatttatagatgtcccagtaactctgaggtagagaccatcatcatccttatcttacagatggggaaactgagtctcagactaagtgactcacccaaggctacctcaggcatccaggttccagagcccccacaattaaccaccagacaaatgggagatcccttttttccctttccgctcagctgacacaaggttgcaggattttccccgagggaatccccgcttggaaacaatggaaatggaagaaaggaaggaaatgccaaaaagctcagaggaagaagaatccagatctaaggccaaactgggttcaacagccactggccatactcttgggcaagtcacttccagggccgctgcatgatttttaagggtactttgccttcatgggccccttgctccattgtttttttaaagcactaaaaattacattttgttatttcattaataggaagacaaatgtaatctaggctggattagatattttcttatgattttaaaagaaattaagaccttcctatgggcccctaaaggtttcatgggccccatgctctgtgcctactgggtaagtgggctctggtcactgctgtgatctggcaaaatgggccagtgttcttgacctcacaggacaggggtgaaagagaccactatctgcaaggaatttttttttatattaaattgtgtttcaaaaatgttgatggtaatatgaagtttctacacccagggaaacaattcaaaggaagagaaagaaaaaataattaataacttctacccccttctcattcccactccatgccctccagacaccaacccagcctcattccacagccttccccaggctggaagatgctgtacagatgtgtccacatccacatgttttggtttgttttttcacaaaggggctaaaggtatgcataaaactgggtaacttgcttttctcacttagtgaaaccacagacatgtcaacagatgcagaactaactctgcttcgcagaggcgacctgatacttcatactatggagaccctaccctcgatttgattcctttagtaatgtttattaattttgttttcagggtttttttttgcctctagaaacaatgctgccataaatatctttttttcctatatgtaacttttacacggagcttttattggtgtgggcagattcccaggaacagggttgctgggttatgggatttgtgtattgccagctcactttccagaaaaatgttgagcgactcacattccctcaccagtgtgtgagagggcctgttcctttcaatcctggccagcactagaagttagctcatctgttcattcagcttgatgtctaagtgcctcctgtgtgttagacgttgtcctagatgtcggaaatacaatctgaaagtgatcatccctgctccctgggggcttctgttctcatggagggaagacagatgacaaacttgaaaacaactattttaaaaaagacagttgtcaatagtggtttgtactgcaagaaaatagagggggagagagttgctgcttgaggtcaggtgattgggggtagaggacttctccaaggaggtgacgttggagctgaccaggaagcaggggtagtcatgggaagagcattccctccagagggaacagcagatgcagaggccaggaggcctggggccaagcatgggagaggggagtagaggagatggaaggggagaggccatcaggggcacatcataagggctatgtgggcagcagtgaagactttgagtgatttctaatggtgggggaagccaacgaagagttttgaagagttttagcccagaggacattttcactgagtgattacagttggccaggtgtggtgcccgggtacaggcattaagtggtaggaacccccagcccacacctttgtgatccttttgttctacaacagggcttctcaacctccacactactgacctttgggcctgatcattctttgttgtggggcctgtcgcgtgcatcgtacagtgtgtagcagcatccccagtctctaccaactaaacgcccatagcactcccctgccaaattatgacagtttggcaaatgtctctagacgttgacaaatgtctccgggggcagaattgttcccgattgagttccaaaggcttctgccaacttggccttatatatatgcccccctacaattaaaattacttttcacttgtggaagttggggccatttggcctaagaaaggctcttctttgtcttagtggttcttacgctttaagacgtgtcagaatcacctgggaaacttgcttagaaataccgattcaggggccctacccaggtagtttgattcagaggatctgaggtggggggcaggaatatatattctgagtgagattttaataagcatccccagtgattctggtactttgagaattggtgcaccagctacaagagcattgtgttggagaggattgaggcttttctgggtgatcttgaagggttggagatgtagagaggcatgtttctgtttatagcagaagaaaaactcatttccagtcagaggtgttggtggcacgggtagtgagcccccatcacgggagaagccaggactgagccagcatgtctcagactccaagaatttgtcctcatctgtgtcatggatcctatttttttactttgccatttacttgatttggctcactgattttttttttgtttttaatttaaatcaacttagtttaaaagggtattctgtgtgactgctgtaaaagaagctgagttttgctgtaagaagggaaacaaactttaaaacaaattgaagtaaagccaggtagttctaatgagatattatggtcaccctaactttggggcctgaaccctgcttttctttttaattttaatttttaatttttctgggtgtgtagtgggtttatatatttatggagtacatgagatattttgatacgggcatacaatgtgtaataatcacatcaggataaatggggtatctgtcacctcaaggatttatcctttgtgttacaaacaatctgattacatttttagtgttttgtttttttttttttttgagatggagtctcgctctgtcacccaggctggagtgcagtgttgccatctcagctcactgcaagctccgcctcctgggttcatgccattctccttcctcagcctcccgagtagctgggattacaggcacctgccaccacacccggctaattttttgtatttttggtagagacggggtttcaccgtggtcttgatctcctgacctcgtgatccgcccgcctcggcctcccaaagtgctgggattacaggcatgagccactgcgcccggccagttatttttaaatgtatcattaaattattattgatcatagtcaccctgttgtgctgtcaaatagtaggtcttattcattctttgtgtgtgtgtttttttgtttttttggggtttgttttttttttttttttttgagatggagtctcgctctgttgccaggctggagtgcagtggtgcaatcttggctcactgcaaccctctgtatttttttttttttttttttttttgagacggagtctcgctctgtcgcccaggtcggactgcggactgcagtggcgcaatctcggctcactgcaagctccgcttcccgggttcacgccattctcctgcctcagcctcccgagtagctgggactacaggcgcccgccaccgcgcccggctaattttttgtatttttagtagagacggggtttcaccttgttagccaggatggtctcgatctcctgacctcatgatccacccgcctcggcctcccaaagtgctgggattacaggcgtgagccaccgcgcccggccctctgtatttttttaataccaattagccatccccacattccccccacccttccactacccttcccagcctcaggtttcttcatcattctagtctctatctccatgagtttgttttaatttttagctcacacaagtgagaacttgcaaagtttgtctttctatgcctggcttatttcacttaacataatgacctccagttttatccatgttgttgcaaatcacaggatcttattctcctgcttttcttttgtttcaaggggcgagtgatgggttgcagggatgttaagatatctctccacttgagactttatcctgagcttgtcaggagaactggaggagaattgaatcaagatgcatttctctaggcgaatctggctctgagagcccctgggtggaagttccttacactcatatctgctagttgaacctcatggtaaccccatgaagtctgggggaagtgcccaaagaggccacaggtggttctggggcatctcagggggcctcagtccagcactcacactcaaggagggatccgggcagggccattgggagaaggcagggtgtccggtggccctcagcagcctgcgggaatgtgtgtgagtgtatgtgtgttaaccatatctataggagtgtacatgggagtgcatctgtgaggcattgtagcctggaggctaagctgtggacccagacatactctgcctgactccagtcccagctctgtaatcttgagcaagtggtttaatctcctcgggcctcagcctcctcatctgtgaaatgggtaggtagaagtagtacctaccttccaggatggttggaagatcaagtgatatacattcaagttccctacatgcagtaagccctctaaatactcactgttgatgtatgtgtatgtgtgtctatctgtctgtctctgcttgtctctcagtgggtgtgtgtctgtcctgtctacatttgtgaggccagcctaggcctggtctctcagcatgcctccctctttcttctccctacagcactgttggtcaccgcaggcctgtcttcctattcaccgtgggcagcagagggatggctgctcagctgctgactgatgaggcactggtgagtcatgttgccctgtcactctcctttccaaaggctggatcctgccttgggtgagcctctgctgctcgaaccctctccaaggcccccagtcccatcttctggggctgtgtctgccctgatgaagagggctgtgcttatagatgatgctgaccctggctgtggggtcagttgtaggggacagggaagctttggaatggccaaactagctctctggactcttaggagacacaggtgggcacctgtgggaagtggtggtttagacatgtgacattgagtgaaaacttgcgcaggaccatgctggatgtgtgacctttaaaatgggcaaacacactaaatgcttcttgtgaatgtgaatgcccacatgtgtgatgaaagtacaaaagcttatgggaatgaggcccacaaattcacccatgattttaccccaaaagataatcactctggaatgtttgagtctggctaagcaattttaatgttaaagattgctttttcatcagagatttcatcctgagcatttctccacatcattaaaaactcctttgtaacgtccatcttaatgaccccataaaagtgttgttcagtggccataccctggtttacttaatggttcctctgttgttggacctttattggtttccaagtattctttttttggttataaacagtgtcatgagggacactgggcacaaatctttctttgtgtcttatatgatttctttaggagtgattccttgaagaggaagattgggttgggtatttttgaggtattttgatattatttccacatcagttacggcggtatgtattcccaccagcatgtctgagcgggtctctgatgatttatatggctgttgtcaggcatttattctgcatgttggatatatttagattggtgcaatattgcaccatgataataaatgataaatggatataaatgacaaatgctataaaccatgatgagcctgataggggacaaatggtgccacgtgatttatttctgagtagcattgtttgtattattagtgaagttcaagtcttagaaaatgtttactagccatttctgtgggcagggaaatgatccatcttgtgctttagcagtctacaggaatctgagtatgctttaaagactttacagaagcaaatgtgtgtgtgtaaatatttgtggcaaatattcttcccagatttgctttttgtttctttattttactttattttttctgtataaaagcatttcatatttttaaaatcaaatctgttggtttctcccactgtggtgtctttcttcatctttaagctgtgaaagggtttctccatccacaggtcacatagcagctatattttcttccttttcaccatttgtcatttgaatgttaacaatgaacttttgaatctacctgtaattgattttgctatataaatgtgtcagtagacttatttgggagctttggtttattctgtcttcatttgtttggtacctttgttgaggtacacatcacgtatcacaaagtgtacaattcactgattttgggtacattcatagagtcgcgttaaccatcaccacagtccatttcagaatattttcatcatcctgaaaaagagccgagtacccattggcactcatttccattttcccccatcagtccacggcccctggcaaccagtaatcagctttctgtctctatgaatttgactgttctggacatttcaaataaatggaatcatacatggtgtggtcttttgtgactggcttctttcactcagcataatatttgcaaggttcaaccatgtggtagcacatatagagcttcattcctttttttgactgaataatattccagtgtgtgtttctacatattttatttatcctttcatcagttgatggacatttgggttgtttccactttttggctattatgaataatgctgctatgaatattcatgtataagtctttgaacatatgttctcagttctcttaggtgtgtacctggaagtggaatgttgggtcatatggttaactctgttgaaccagtaaaggaaccaccagactgttttcctaagcgattgcaccatgatgccttcatttttgtctcatctgtgattcttgccttgaattcttcttttacctacattacttagaaagatttgttgattgtttttatttcaacagggttgggagttttggtttaagttttttttttttttaattactactagtgtaattacattcaatttttaaaaaaaattgagcctgtctggtttcagcgttttccctgtggtgaaatggtttgtgtcattagacaggaaaccgaaaaagatggagtactagaaaaaggggccttggacacgtacgtgcagagaactcagaggccctttgttagcacttctgtcccaacacgatgggctcccagacctggaaggctgtgttctgtgtctcagcacaaccctggtgccagtctgggcttggtgcctggagactgctcagtgaatagttgagtgaattaggtgggtgtacttagggaagacttccagaaggaattgttgtattacaattttgtaaaataaataaatataggtgtgagagggaacttttggaggtaatggatccgtttatggccttgatggtggtgatggttccacgggtgtatatgcatctgcaaactcatcaagttatgtatattattaaatatgcacagctttttatatatcagtcacacctcaatcaagtagtttaaatttttagaaaaggaggaattattagctgggctggctgaaagatacattgggccaaaaggtcaaataatatcatataaggatctacagttgtacataagatatatattaaatatcaacattaaataatagcaagagtcgacatttactgagagcttcctccatcacacgaggcactgtgtttggaccatatttgtacacatttaaccttacgaccctgtggagggggacattgttatcaggaagcctgcctctcatatgaggcttagaaagagaaagacagttgtccaaggaaacacagctcatgaggggcagagccaggattccgttgcagagtgtggttcctgagcctacactctgaaccaccagcccaactgctttctatcaaaggtgacccctcaggcagaggaggctatcttgagcccaagccccagaagggcaccctaggaccatagagggactagccagcgggggtgaggcctccccttgggattcagttggtggtggggacactcagtatgctggagagagccagtgagctctgagtgtcagtaacaatagctggcacttattgagtgcctgctgtatgctatgcattaccattctgagtgtcttacataaataagtgggcaggtggggcctgtagcaaattggagctttcttgccccatcaaagggtcagccaccactcagctccagcctagagtggccagatattctgctgtttaaagagaaactagaaattcattttcttggtaaattgtggatgtgtttttcatgtgagtaacaattaaaaacaattttgaaacccccataggagcaaaatagaaatgtgtacagctggcttcaggcccaggtacatctcatatgctctgtgtgctcagaactcccgttctttccttgtgccttgggggttgtaccactgaatcagttcagaacagcaggtccctctgtaggacacaataggtctctcattactcacatgccatgctgtgaggaagcccaagcagccacaaggaaaagtgatgtggagaaaaagagatgcccaccaaggcctcagctgtgccatccataccagctcaagagacagacttgtaaacaaagaagctagcagactactctagcccagctgccatccaactgccaccacacaagagatgccaggcacgaactgcccagctgagcccatcaaccccaaaatagtaataaattgttgtttttgagccattaagttctgagatggctgctacccagcaaaatataactggatcagaaatttaatctgtggccatggctcaagatcttcatgtggcagagtcatgcatggatgatgtgatcagccagcaataatgtgagacgtgcaggccttcatcacactagggaggaggtcgactgtcaagcaccatctctggaagtggcttcaggatcgcttgtgatctgtctggaagagaagcgccagctgggacactctgtgatatttatccaactgtcttctttataggcaaaagacgtgccatccatctcagggtctgatccaaactaaactgctccttggctgtgatgccagctagattggtattatacatggatgaggccatctaatgttggggctgagagttgaactgactaggtttaaaatgctgccactcccatctgtgtgacctcttgtgcctcagtctccccctttgtaaaagaaatgagctcataaaagtgcctacatagtagggttcttttgaagattaagtgagatggtgtgtgcagtgggcttagaacaatacctggcatgtagtatgtgcttaatgaacattagttatttttatcattatttactaatgaattagtatggaagaaacctggtgccaataccatgtctgtcttattcacagttgtatgcccagtgcctggtgcatggcaggcacttaataaatattcgtcaaatgaatacatgaaagggtgaagtatcactctgtgtgtttccaggaaccatcaatgaacatatttagaatatgttagaatatgtattagataccattgatctagaattcctgtttagggggtaaaaattcaaccatacttttctggtagcccggaaaattataaattaatcagttaaatttccgatccagttatattttgctgggtagtaaccatctcagaacttaatggctcaaaaactacaatttattactattttggggttgatgggctcagctgggcagttcgtgcctggcatctcttgtgtggtggctgttggatggcagctgggctagagtagtctgctggcttctttgctcacatgtctgtctcttgctgtggtatggatggcaccgctgaggccttggtgggcatcttttttttttccacatggattttccttgtggctgcttgggcttcctcacagcatggcatgtgagtaatgagacataatgagacacctgttgtgatgactggcttctcccagagcaagtgttccaggaggctgaggcaggagctggaagtcttctgtgatctagcctgagagtcccagaacattacctctgccagattctattggtcaagcaggtccctaaggccagcccacattcaaggatgggggaactagactccactagtgaaggatttgaggccattttcaacaagtctacccacttactattgtctaccaaagctgacttatattgaaagagacagtgaaaatgggtaatttgatccagcaaaatataactgtatcagaaatttaactggtgttttaatttacaattttctgggctaccagaaaagcatggttgaatttttaccccctaaacaggaattctagatcaatggtatctaatacgtattctgatatattctaaatatgttcattgatggttcttggaaaggtacctgcattttccttgcttgggcagcaggactgggcatttctgattcacagccctgagtatgataattgagagtatgagagttgtatgctcattttgggcaaatactcaaagcaggtagctttttatgtgtcttcctatcacatacgattgctttcttgggcctgttcaaggtaccatgtaagaaatttaaggattcagtcatttgttgtacaaacatttattgagtacctactaagtgccaggcgctgttctagggtctgaggattctgtggtggcccaggcagacacaacttcacaaccccccatgacgtagatgctgttatccccttttaacagaggaagaaactgaagcctgcagaggttaggtaattgaagatgttcactttcatacattcacatagctagaaaatggccaagccagggtttgataacaggtctttgtacttcccagacatgcccttaagacactgcactgtctttcaaaaaacaaacaaacaaacaaaaacactcacccccctgtattacttgtggctgtgtaacaagttacccccaaactcagttgcttaaagcaacaattatttactattttacacagtttctgagggtcaggaatggggcagtggcatggctgtggctcaagatcttcagtcttctcagggcttcccaggctgcagaatcccttctgagagcctcacacagtggttggtggtgggatgccttaactccttactgacattggtgggaggcttcagctgctggtcagatgggcctctccaaaggactctgcagggcagctggcttcctccaaagtgagtaatccaagggaaaaagagggagtgtgcccaggaccaaagctatgatctttataacctttttgtctttttttttccccctaaatttcttattgtgctaaaatacacataacataaaatttgccatcttaaccatttttaagtgtgcagttgagtggcattaaatgcattcctaatgtgcagcgccaccaccatccatctccagaactctttgatcttgtaaaactgaaactctgcagccattaaacaaacactttccatccccctcccctccgcccctggcagctgccattccacaagtctctataaatttgacttgatacttcatttaaatcatggaatcgtgcagtagttttacttctgtgtctggcttatttcgctgagcataatgtccccaaggttcacccttgtagcatgtgtcagaattttttttttttaaaggcggaataatatcccattgtatgcatagactgcattttgcttatccactcgtgcttacgtacacttgggttgcttccaccttttggcgattgtgaatagtgagtgtgcatataacctttccttggaagtgacaccacactaacctctgctgtatgttgttgatcacacagaatcaccctggcacagtgaaggggctacataaggctgtggataccaggaactggggatcattcggggctgtcttggaggctgccaacacacacacacacacatacacataaaacatgaaaatattcacagtgtcactcctctgatacagctgctgttcacattttgacacatttccttccatctttttcctgtgtattgttttcatgtggttgagataaaatggttatttagaattctggaaacccagaagcaactctacatggaaaagctctgcataatcttgtaatgaaaatagctatgtaattggccatgggggtaggctattatttaatgaatcccatgacatggatgttatggttgtccaaagacttgcccatataaataaaatggagtggacatctttgtgcatgaagctttgcccaatttttggattatcttgttgggatagatttccagaagtaaaatgtctgaacattttaaacacataaaatgtgtaatattaaccttttaattgaagaaacaataggtaaaacgcacctatttgaaaattagtaaactgggaaaatgaattctcccacttcccctccccatcctgaaactactggcatcacctgctcttaccagattctattttggttaagagctttattgaggtataattcacgtatcgtaaaatccatccatataaagtagacacattaatatccagtgctttttagtttatttacagttatgcaaccatcaccacaatattttagaaaatttttaccactccaaaaagaaaccccatacccattggcagtcactccccatttctctccaacccaccctcacccctaggcaaccacacatctaccttcattctattttgcctattccggacattgtatataaatgaggcatacgatatggattttgcctgtcccggacattgtgtataaatgaggcatacgatacagattttgcctgttccggacattgtccataaatgaggcatacgatatggattttgcctgttctggacattgtacataaatgagccatacgatatggattttgcctgttctggacattgtacataaatgaggcatacgatatggattttgcctgtcccggacgttgcatataaatgaggcatacgatatggattttgcctgttccggacattgtacataaatgaggcatacggtatggattttgcctgttctggacattgtacataaatgaggcatacgatatggattttgcctattccggacattgtgtacaaatgaggcatacgatatggtcttctgtgtccggcatctttcacttggtgtcatgttttccaggttccttcatgttgcagcgtgtgtcagagctgtcgtgtggacgaaccacattgtttatccattcgtcaggagatggacatttgagtcgtttccactttgggactattgcgagtaacattgctatgagcatcagtgtatagtttttgtgtggcactctgttttcatttttcttagatatctaccaagaatggaagtgctaggtcataaggtaactctgtgtttattcacttgaggaaatgccagactgtcttccaaagcagctgaaccattttacatccccaccagctgtgcattcttaccagtttcttgcattcacttccataaagaggtctgcgcctgtataagcacatatgtgtaaatttccctttattatttcctcttatggaaatgttaacaaactagacacactgttctgggcattgatctgttttttcatgtaacagtatattcgggagatcattctgcacctgcagctaaggggctgccccctttttttttgttatggctgtgtgtattccactgtggtggattcactgacctgatttatccaaacccctactgatggccatttgggatgtgttcagtctttttacttcttcatctgatactgtaataaatatccttacacatctatgtttttgcatgtgtattaatatatctgaattagtctaaagtgttcaaaagaatttgaatattagttttgatagattttgctaaatgccactccatagacattgtcccagtctgttctcctatcaggagtgtcagagaggaatgtttcagtatttgagttggagagagtatttcctttagagaggaatgttgttgcagtatttgtccttttgtgactggcatatttcatggagcagaatgtcctcaaggttcacccatgttgtagcatgtgtcagaatttctttccttattaagtctgaatgagatttcattgtatatagagaccacattttcttcttctttttgtctgttagtgtacacttgttgcttccaccttttgtctattgtgaatagtgctgttaggaacatgggtgtgcaaatacagagtgcacctgtaaaattctaaattagattctgtccctctcctgctcagaccttccaaagaatgaataagaaggagccagcttaggccagacctgaaggaagagcattttgggcagaagaaacggctagtgcaagttccctgggggatattcgaggagagaaggcaggctggcagggctggagcagagcacaaggggcagagcagttgtggggacagtgtgggggtcagaggtcagagtcaggactacatgtatgggcaccacaagttttcattacctgccgctctgggtggttcgtgagaggcagcagcctgcaaggatgaggactcgggctctggagacagcccatgaggttcaaagcctggctgtcccacgcagtagctgtgtgctttggtccaggaacctaccctgtctgtgccttggtttcttttatctctaccttccagcctccctccagtgccccctattgacagagcttcacagggagtagctgctaaggcagaaacatcacgggatcgcagagtcaaagcccgcagatctctgtgcagagtgtggaaggggggcttttggggatgaaagacaatcacttaatcacttttaaacaggcatactatattataatgttagcacctgactcgtaggtctgttttaagttaataatgactgaatcaatatgtgccagcacggtatctatttctcaaggctgctgtaaataagtaccacagactgtgcagcttaaacaaaggacatttattctgtcacagttctggaggctggaagtccctgatcaaagtatccacaggaccacgctccctctgaaggctcaagggaaggctctgttccaggcctgtctcccacctgctggcaagttccctgacttgtggcagcataactccattcttcacacagccttgtccctgtgtacatgtctctctctgtccatgtttttcctttctgaaatgcaaattaaaaccacaacaccaccttaccccagccaggatggccattattaaaaagtcaaaaaacaatagattggcgtggatgtggtgaaaagggaatgcttatacactgctgctgggaatataaattagtacaacttctttggaaaacagtattgaggtttctcaaagaactaaaagtagatctcccatttgatccagcaatctcactacttggtgtcaacgcaaaggaaaataagtatttatatcaaaaagacacctgcacgtgtatgtttattgcagcacgattcacaattgcaaatatatgcagtcaacctaagtgcccatcaaccaatgaataaggaaagtgcccatcaacccatagataaagaaaatgtgatacacacacatataatatatatgtatatcacatttatacacatacacacatacatacacacacataccatggaatactactcagccataaaaaataatgaaataatgtcttttacagcaacttagatggaactagaggccattatcataagttaagtaactcaggaatggaaaaccaaatgctgtgtgttctcacttatgagtgggagctaagcgatggatatacagaggcatactgagtgttataatagactttggaaactcagaagcgggcaaggtggcaggggggtgaggggtgaaaaactacatattgggtacaatgtacactattcaggtgatgggtgcactaaaatcccagactttaccactgtacatttcatccctgtaaccaaaaattacctgtacccctaaagctattgagattttaaaaattgaaaaacaaatttcccttttctataaggacaccagtcctgttggattagggccccctacccccactccaggatgacctcattttaactgatttcatctgcagcagccctgtttccaaataaggtcatgttcttgagaccttgaaggttgggacatcagcatatgaattggaggggctcataattcaacccataccaaccacttagagtagtacctggcacatagcagctgctgcataatgactggtgttgcctacctcatcatcaccatccacactgctccgccaggttctttcagtccacaggcttgtgacatctaccacaaagtgctgctccttccacgtggacttctctccactccccagcagtctcatctgccttttcaccttcgggtcttgatccaagctctcttccctacccagaatctcccactaaagacccaaccaccagttctcttcacagactactcaaagtcttcctgggcaccccccacagctggcattactcaggcacctggagacctttgttcataccttcatgattgattgcgtttaccaaattacgtgtctttgtctgcctctgccatgaggaactagttcttgaacattttgtgtctgtatcccagcactgggcttgctgcctggtgcttagtaggggctcagaaaagttagctgtgcccctggattccatctggggctctgcctctgctgtgctcctaatgcatttgttgattcactgggttagactcactttgccttcagttcctttccatctggttctcagatctgtgaccttctgttccagaatgtttcatatgggatttatttctctatcagagtgccaacccaatataactagacacagagaaaactgtgagtgatccctttagaactctgcatcttattgaaatcacttcagctacatcccatctgcctcccctaaatcctcttggcttttctggccattcctccacgcctctgtaaggagggccctgcgatgagcggatgtgggtttcctcttacaggaatcagtgacgttcagggatgtgactgtggacttcacccaggaggagtggcagcagctggagcctgcccagaaggacctgtacagggatgtcatgctggagaactacaggaacctggtctcactgggtaaggggcagcttcgttgagttactcatcattggcccataacttcaggaccacaaataaattaaaaaaaaaaaaagatcaacagatctgactacatggaaagttttaaaatttgctctacttgaagctaaaaataaagttgatcacgatggtatgggaaataatatttctcacgtgttttacattcaaagggtcataattatgtaagcagctcctgggaataagaaaaagactaagcgaataatagaatggaccaaacttatgagctggtgattcatagatttagaaatacacaaagttaacactttataaaagttttttaaaccttactactggagacacacaaattgaggtactagcagtttttgcccatgaagtgcacaaagatgaaaaaagaataatagcccatattatgaggctgtagaggaaaggactctcattttaggagtataaagttgggacagctcttttggaggatagcttggccttatcagtcaaatattgaaggattccatttttagagatctgtcctttagaaattctcatgtaagtatgcaaagttttccatgggaagaaaaatcaaggaaaacgacctaaatgcccagctgtctaagactgactgaacgtatcaaggcctatcgatatgttggaaaccaggcagctcttcaaagctgaggactgtttgtaggcactgccatgaaaagatgtcccacaacatactgttaggttaaaacactcacttttgtaatcagagcgtggtcctatttctttaacagcttttctggaggtattattgacctgtaattaaccacgcatatataaagtgaagagtttgatgcattttgacatagtgcatacccaggaaaccatcaccatgatcaagataaaggacatatctatcatccccaagagattcctcatcctcctttattacccctctctccccttcctcaacccccatccccagggatcccctggtctgctttatgtcactgtggttgagtttacctgctctccagttttatatacatggaatcatacagtatgtacccttttttttttggtctggctttttttggtttgacttggcattattttgagattcacccatgtcattgcatgtctcatagttcatttatttttatctctgtgtattattccactgtatgtgtatgccacaatttgttcagccattcgcctggtgatcaacatttgggtcatttccagttctgggctattacaaataaagctgctgtgaacatttgtgaacagttctttgtgtagacatttgcttttccttctgttgagtggaaagtctggatcatgtgctacatgtatatttaacttgtttaagaaactgccaacctgttttccaaagtgattgtactatttcacatttccaccagcagcgcacaagcttcattctaattgctttatcttttaaatttagcctcccttgtaggtgtgtggtctcatcactgtgcttttcatttgatactgacacttgtaggtgtgtggtctcatcactgcgcttttcatttgatactgataatcttttcctgcgcttatttgatgtttgtatattctctttggtaaagtatctgttcaagtcttttcctgtttttttttttttttctgttgggttattattgaattttgaaagttcactatgtattctttaactatctagaagtccaatgcgctatccattgcgtcacagagccagaccactatgtattcttgatacaagattttctttagatatatgccgtgcaaatattacctcccattctgtggattgtgttttcactttcttgatggcattatttctgactctaaagtttttaattttgatgtagtgcgatgtatctattttttgttgttctcgttgcctgtatttttggtggtatatctaaacaatctaactcaaagccatgaagatttattcctgtgttttattctaaggttttagtggtttagctcttcactgaggtctttgatccattttgaattaatttttgtgagtgatgtaagaacggggctcaacatcattcctttgcatgtgaatatccaggtgccccagtgcaatttgttgaagagcagaagtttttaattcaatgaagtccagtttatcaattttttttggttttggtgtcatttgtaagaaatcttggcctatcccaaggcctcagaggttttcttctgtaagttatatagttttaggttttacattttgttctttgatccatttagagttgaattcttaatatgatgtaaagtattaatccaagtttattggggtatgttggggggacaaatgtatgtccagttgtccaacaccatttgttgaaaagaccactttctccaatcgcctttgcatttttatcaaaaatcacttgtccatacaagtgtgggtccaattctgaatcctgttctgtccatctgtttgtgtgcctttgcaccaataccaagcaatgtcatcctttcagatcttgcttttatgacttgtgcccagtctagaatgacattctcctcaagatcattctgggttttctgcccaaagccccatgaatgacaaggttttacagtctgattggtaggaaaaggcactgttcccagccctgtgtcagctccggtcactgttttcaaatcctttcagatgtttttttcctgtgttgggtagtttcctgacatgcacgttttgaccaatagtctgctaaatactggagggagttccttgcaggtcttcagaacactgtgcagctcattcctctctcatctgtcctgggaactctatctgccttggtctctcagctctgtctcctcaacttggggagttggccagactgtacctcaatttacctttcctttgtcagagcctggaaacttcccaggcagttagctggggcagttgtaggacccaccttgtttgattttcttctctcagggattttgcccttcattgcctgatattcaatgtcttcacaaccattgttttatatattttgttttaggctcaagggaatcttatcctttatactctgtcttggacaaaagccccatttgggggaaaaatgtgtgtgtgcatgtacaggcgttggaggggagtctaaaatataaaccaaactgttaactctggtgagtaagattacaggagacttccattttcttttgtttttttttgttttttttgagacagtcttgctctgttgcccaagctggagtgcagtggcatgatcagagctcactgcaacctccgcctccctggttaaagcgattctcctgcctcagcctcctaagtagctaggattacaggtgcctgccaccacacccagctaattcttgtatttttagtagacatagggtttcaccatgttggccaggctggtctcaaactcctgaccaagtgatctgcctgattcagcctcccaatatgctgagattacagagacttccattttctccattactgttttggtgtttgatgttttaaaaacaagtgtgaattactttctaatcagaaacaagcatagaaagacagaaaactgaaaaagtgtgaaggacgagatttagcaatgtgaaaaaagaatgcacctacatttgtatcaaaaggaatgaatagcgttttgcacattaacggcttttggcgaaagtgccctctgcagaagcttcggatgtctcccatgacagtggccatgccgtcagacttcctgctcttttgctgacctgactagagaaaaggtgtgatcgggtagttttaatctgggtggtgtggaactgtgttttcacagctgtcgtggttaagggctgagtgtttgctgtttgcagatgatctctactgcagggttttagcctgagaaagggaggtggcttcctcccctctgtccctctgctggtatgctgcccccagctctcctgatttctccaggtcatgttcactccaggagacttccagctgtattcacaaccaagactcctggtcctctccgatagctgccagctcatattccagagcatctcagactccatcagccccagacaaaattcaccatcacccctggagacagtcttctctccaccgagtctacaccccacactaccatctgtgccagcatctgggcattgtgccacaccctgactagggtctctaaaccacaatcattctcctgcatgaagtatttctcagttcttttcctctgagatgggaaaagtgatgcatggtaatatagccactcctcaggagccacagctcgggggccacactgccagggcttgaatcctgctgtgcctcaggtgtattgtgccctcgagtacatctctgactccattcttgtatctccgtttcctcatcagcaaaatgaggatggtcataactatctactactgtatgtaactcaagtatgattgtgagggtctccagagatccgtgcaaattgttcagcactgtgccaggcgtgttgccagtgctccatactcgcttatctggtaccttctgtgtgcaggctgtgtgaggagctggggggtgagcaaggcccttgcctctagtggagctgactcctgctgggggccgataataatcagatcaagggacaggcagagaaaaattgccacaggtcactgagtgttcataaagaagtgggcaggaggaccttccttccttacgtagggtggattgggaaggctcccgtggggttgtggggaaacaggcctgaaggataaggacgtccacggcaggtccacaggacagtggatgcagaggccctgaggcaggaagaacacacggacaagagggagagcatggtgatgagaaactgggagggagggtgggcaggggacgactcaggcaggcctgctgggtgctgagggccctgaggctgctggaggtcctggcatcattctcagtaccgtagggaggtcacgggagggttgatctgactcctcagaagaccgcactcccggaggagtggaggacgcattgcaggggtgagaatggggtggggaggacagagaggagctgctgtcgcatttcaggcaaggacccgtggtggccagccggctttttgtcagtggggaccgggagatttggtctgattcaggctgtttgcgcacagcaatgcttgccagcagtcaggacggtgggagggaaagggcaagtcaggatgtctgctaagtctctctaaaacaattttttaaattttatatttaaaactgtgaaaaatatatagagaacataaaatgtaccattttaaccacttataggagtacagttcagtggccttaaggacattgatgttgttgtgcagccatcaccgccatccatccccacagctcttttcatctcccgcaaatgaaaccctatccccattaaacaccaactcccacccactcctcagcccccggcatcctctgttctaccgtctgtctctgggaatccgacctccaggtaccgcagatgagtggaatcacatggcatccatcctttcatgtctgatttattttactaagtctctttgatgggctttgcttttttaaaaaatgtttttcatggggaaagtctgaaatcccaagtttcgtatcggatgtgttaggcttgggctatccagttgagatgctgggcttttttgaacagtttggacatagcccagaaagcaggtctgggctgaaggtgtatgtttgagcagcatcagcctgtggataacgtttagatccagactcactttgtgtggctttgaaggtccagtgtgattcaggagagtggtctcaaactcaggtggcctcaggaactaccaggtggatcatttatgtggaggagggggacagctgctgccccatgcaatgtcttgttgcccataagaatgaggctccacgtggccatatcttcatgttttttatgagctagcagccacatggacagcaacttttaaatgctgggaatgagtcccctgatgcagagtctagactccacctaggctagaaatcgaggtttagaaatgaacaggatacacgtggaaggtgattgaagctgtgggcacagaggtatttagccagggagggtggatgagcagagaaagagggtctgaacccaagctccacggaatgcctgccacccaagaactaggcagcgtgtgacgtagcaacagaagcaattgtgagaccccaagtcatgtgattattgtgggctcaagtgagcggtcctgtgtgtatgaacacttagtgctgaggctgatgagagggctggggtgcgggagggctggggccagccagggcaggtgcgtgatgagctagcgggagccggagccccagccaggggagaggatcttgcagccagcaaccctggggcagccataccagagaagtggcaaaggggcaggagaaatgcccgatttttctctcatttcacttccagtttcctgcctttggccaaacacacaggaagccagtgggcaaagtcagcatcctgagcacagggcaggtcagagaagggtggagaatagaaagtgggtcgaaggagtagagaataaccaacacatgccatataaatgctagctatttattatttctttattctttttcttcttttttcaatatttatttatttatttattttttaagagacagggtctcaccctgtcacccatgctggagtgcagtgacgtgatcatagctcactgcaacctcgaattcctgggctcaagtgatcctcccacctcagcctctcaagtagctgggacaataggcatgtgccaccatgcctggctaatttttaaaaaaaaatttagtagaggcgggggtggggggtctcactatgttgcccaggctggtctcaagcaatccttgcctcagcctcccaaagtgttgggattacaggcatgagccactgtgcctggccatcttattatttctgataaaaactgttgcttgaggagcacgactggttgtggatctgcaggatgaagtgaggaggccctgcaagtcagtagccggctgcagtcattcctactcaggtttgcagagcctgccctttgctccctgcaagcccagctcactactgcagtttctctccaggagtgcctgtcatccctcttctgaagggacatttgctctccctgttcacctcctgtgttgactctgcttcataaaccacattggcctcagttccatgcctccctcctccctccctctctgatccaaggttcttctttgctaactcgctctgtgccttgggcctcattggggtcggtttcatttgctccttcctgctgtggagcttcctcactcccagcatctttaactacatgtatttgcatcttctgtttttgtttttttcagactgggagactagacctgaaatgaaagagttggatccaaagaatgacatttcggaagacaagctctccgttgttggggaggccacggggggacccacgaggaatggtgccaggggtcctggctcagaaggagtgtgggaaccaggcagctggccagagaggccgcggggagatgcaggtgcagagtgggagccattgggaattccccaggggaacaaactcttagggggctcagtacccgcatgtcatgaactgaaggcatttgccaaccaaggctgtgtcctggtcccaccacggctggacgaccccacagaaaagggggcctgtccacccgtaaggcgtggcaagaacttctccagcacttcagacctcagtaagccccccatgccctgcgaggagaagaaaacctacgactgcagcgagtgtggcaaggcctttagccgaagctcgtccctgataaagcaccaaaggatccacacgggagaaaagccgtttgagtgtgacacctgtgggaagcacttcatcgagcgctcgtccctcaccatccaccagcgggtgcacacgggcgagaagccctatgcctgcggggactgcggcaaggccttcagccagcgcatgaacctcactgtgcaccagcgcacgcacacgggcgagaagccgtatgtgtgcgacgtgtgtggcaaggccttccggaagacttcctctctcacccagcacgagcggatccacacgggggagaagccctacgcgtgcggggactgcggcaaggccttcagccagaacatgcacctcatcgtgcaccagcgcacgcacaccggggagaagccgtacgtgtgccccgagtgcgggcgagccttcagccagaacatgcacctgaccgagcaccagcgcacgcacaccggggagaagccgtacgcctgcaaggagtgcggcaaggccttcaacaagagctcctcgctcaccctgcaccagaggaaccacaccggcgagaagccctacgtgtgcggcgagtgcggcaaggccttcagccagagctcctacctcatccagcaccagcgcttccacatcggcgtgaagccgttcgagtgcagcgagtgcggcaaggccttcagcaagaactcctcgctcacgcagcaccagcgcatccacaccggcgagaagccctacgagtgctacatctgcaagaagcacttcacggggcgctcgtccctcatcgtgcaccagatcgtgcacaccggggagaagccctacgtgtgcggcgagtgcggcaaggccttcagccagagcgcctacctcatcgagcaccagcggatccacaccggcgagaagccgtacaggtgcggccagtgcgggaagtccttcatcaagaactcctccctcactgtgcaccagcggatccacacgggcgagaagccctaccgatgcggcgagtgcgggaagaccttcagccgcaacacgaacctgacgcgccacctgcggattcacacctgagcgcctctgtgcagggctctcactggcggtgcccaggacggacgccagatggctgcgcgctttgtcagcagtgctgtgagaagttctcccctggggtggggactcggggtcaggggagctcaggaatgtggggttgtggaggggctggctgatcacacatgccccctccttactgagcctcagaaagcaagcccctcggtgtctgacgtatctggggacacttcaaggttcactgtagctgagccatggccgctggtaacagacatcagggttccagactagccctcttgagtaactgtcctagagctgggacaggtcacgcctgcctccacatctctgtttcttcagcgggaaagtggagctggtggaggggagggaggagacatctccctctttgtcagatacatcctggagtccagatgcagcttgtcaccatctgcattttctccgtgggttgggagcgtgagggccttcctatccctccacccaccgtttccctgcagtgcacgctggcagccaccaagctaggaagtggcaggagtttgccggttgtttgtgaggggaaaaatttttttttcagagttagcaaataacagtaactactgctttgaatgccaaagtttcttagagtggtctgttacgttttttaaaaataaaacttttaattaagggagactatgttattttaaacagtcttctgttttggccagttgtctggtcaaaatcggcttcagtgattgtgggaggggcaagaaggaaaagaaacagcagcaggtttgatattcagaaagaaatatgcatggattcaataagtatatacatctgagcacagattatttttatagtgatttttgcagctaaatgtgaaggcaactgtcttaagtcccttcctgctgctgtaacaaaagaccttagactgggtaatttataaacaatagaaatttgtcactcatggttctggatgctgggaagtccaagatcaaggctctggcagatttggtgtctgatggggtatgttcttcataggtagtgcttgtgtcttgatgtgtgtcttcacgtggttgtaaacggcagacttcctcaggccccttataagggtgctaatcccagtcacaagggccctgacctcatgacctcccaaaggtcctccctcttcatactgttacattggggatcaagtttccaatatgtgaatacagggaagcaccaacagaccatatcagtaacttcgagtgagtttcctaaggccgactgaagctctgtttacacataagagtgttccccaaagtgcactttctctggggccttttaggccatacttttaattttgttatttgatactactggttgctaatgttctggcatttccagttgttccacactccctgacactggtgtacacaaataaataatacagaaaaaaaattatatcagcaagcacattctgcaaataagaaaaacagccactcgggcacgtataaacaaggtggaccgtttttcaaattctggcagtcaagtgggcctcagggtgggtttgattcaggctctcatcattggagccatagctgtggttctctgtgatgctctggctctcccttcatacttcttaacatcatcctcaggctggcttcccacgtgggattgtggtggtttccagcagcgagtcttgatcagacattgctttagttgcatctgttgtgggaataaatgagaatatgtatgcactgcagagaatggagtgttaaaacagtcaacaaatgttagctaatatgtacacaagattttactactctttagcagcaaaatggaggggaagaccttctaaggccctttggagagatgaaatggctcatttaaccctcacaagatcctcgaggtagggattcatgtgcatgtcgtatagataaggaatctgaggttcagtgaggcaaggtaagcttcctgagggcacacaacatggaagtggaggggacagggtgtgagctggggtccacctgggctccgaggtccgtgctccttgcctacactggactacttctagagatggacatattgaatttctcaggacttgactcctggccttggtttcctggactccccagtgtgtgaagcagagatgggatcgaggctgcaccaccaccatccccctctcccatccagagaaccagccgggccacctctcaggtccctcctgtttcttttctctgcaacccaagctgatgtggagggcattgaggctcctctggggggatgctgtggtaccaggtgggtctcacatccctggtctcccgcctcctgggcaagctccccactcagggctccacgtttccccaagaggaaccctgaggtggctggaataatggccacattgacggagtcacttgtccaactctgagggggcgctctcatcacccccactctacagatggggaaacaggctcgcagaggttcaggcacctgcccaaggtcacacagctgctggattcaaacccattctgactccagaagctggactgcagtccacggcaccactccacccaccagttcctcagtcaggtacttactgaagccaaattaaatttacccccctgaaaatgtgggtttggcagggatcaagcaggtcaggaacctgctttttaacaagtcttctatcccatacatctgtccaaggcactatttggggttatgtgctggccttcgagttcaccctcactgggccctgtgtccctgtgtccctgtgtccccaggcctgacccaagcctggccttgaggtagaggtcatgggtgctgggtggggtctgaatgacccctttatcacttggagtaaatgccaaactcctcacaaacccctgtgtgacgcagcctctcccagctcccgtcccgctccccctgctcactctgcttcagccacactgtgctttcgttcagtcccagcgctggcccagcccactcccaccgcaggggcctctcccttcctggcccagcacccacgctgagcttcctcaggtccctgatgctcagtttcacgtgtcggcctggctgggctccagtgcccagcaggcccatcgcagtgagtcccggtggtgctgagaagacactttatagatgtggatgtcacccatgtcagctgactttaagtaaacgattattatctgcaatgtgtgtgggcctcatctaatcagttgaaggccttaagagcaaaaccagtttcttggagagtaaaaaactctgcctcaggattacagtgccaactccggcctgagtttccagcctaccagcctaccttatggatttgggacttgccagctcccacagtagcatgacccggttatttaaattaaatctatttatatataaaagtatacatatgccatatgtataacaagaaatatgaggtatataaaaggatatgtataagatatatatagggtagggcatggtgacccacacctgtaatcccagcactttgggaggccaaggtgggaggattacttgagaccaggagtttgagaccagcctaggcaacatagcaagacctcatctttacaaaacgttagaaaaattagccaggtgtggtggcgtgtgcctgtggtcccagctactcaagagacggaggtgggaggattgcccgagtccaggaattagaggttgcagtgaggtatgatcatgccattgcactccagcctgggtgacaagggaagactctctcttaaaaaaaaaaaaaggtcagtcagtcaaggtggctcatgcctgtaattccagcactttggtaggccgaggcaggcagatcacctgaggtcaggagtttgagaccagcgtggccaacatggtgaaaccccatctctactaaaaatacaaaattagccgggcatggtggcatgtgtctgtaatctcagctgcttgggagactgagacaggagaatcacttgaacccaggagacggaggttgcagtgagctgagatcatgccactgcactccagcctggccgatggtatgagactctgtctcaaaaaaaaaaaatctatatgagatatataatgtatatataataaatgcataatatatataatagcatatatatgatatatctatatgggatatatatgatctaaataaggcaatctatatgataggacatatataactatattaagttgtatcactactgcctctctggagaaccctaactgataacaaggccctccctgatcgcccttcttcccctgcttcgtattccccatcacacgcactgcagtctgtattgatacttgttttctttctttaccatccatctccatcacgggcattcaggtagagatctggatgttgctggttctgctcactgttgttttccccagcacttggcacggcacaggcacaggcagatagtaggtgctcagtaaatgtccgttgaatgaaagagttaatggtaggtgctcaataaatgcttcccggctgaatcacgaataagcaagtgagttttctgaggcagcagcccattccaccctggacctaacatagtccctggagacctggatctgacttggattcctcagccttttgtccactgcccctgtctgatttaaaatgtaggttttattcttattctgagaaggtgaggcccataggtcaggagacaccagggattgaaaagagagttgctacagttcctgagaggcgagggcagtgccaggccacacagggaagcccagggcaggtcaggaggtggaggggctgggggaagacgggggcaggagcttctctgtcgcttccacagcaaggagcaggattggcttctctgagtaatttagcggttctggggcacaggggctgcccttgttgtctggttctcagccctggatgagggcaggtgcacagagcccctgagtgtgggagcccagttggggaggtgctgggtgtgggctctggattgggtggtttgcttgtgaaaggcacgctctcaaggggattctttgccgtctctaggaatcacctggatctgggagtgacagtccctccaaggtcggcaaggcttcaaaatgtcaaagcatcagaaaataaaaggcattgttcatacaatctttgctctagccagagataatcccctgcatttggccttagcatgggcagccggagaaggctctgggcccagatcttggctgaggggcagcctcaggagacccaggctgcagagggaaggcccttctgctcctccctgcctggacaccatcttattgtaggaatcccagtcagtacccgggaacccagtgcgcctgccccagagcatgatgaaggggcctcctgggtggactgatgcccctggcagccgcagattcctgggctgagaatggtccaactgagaggctgggcctcagctcacagcctcagatatgggggagaggaggaaggtcttcctgcagaatcccagtgtggtggcagtttccaaattacatgagatgagctagggatcctctccaagatcacagacttttctatgacccctgacaggccaggcgtagggccatgaacatgagtgatttgagtcaagcaggtgcactatccaacacacaccttacagccctaataatattttattatacatactattatttattaatagaaagtttatatttgtaatagagtcttaaatatttatataaaagagctacatacattaacagggcttacatcattaatatagggtaatactattctcactttcaattgaggaaacaggctcagaacactaataattagttcgagatgatggagctgaaaagccagactttatatgcaatgtttctgatttctaaatggcaaaaatttacatatttgttaagaaacgctattttgggtcaggcgtggtgatgtgtgcctgtcctcccagccactctggaggccaaggtgggaggattacttgaggccagaagttggaggctgcagtgagccatgattgtaccactgcactccagtcggggcaggagagtgaaaggctgtctcaaaacaaacaaaaaatatatgctctttgggcctggactggacaggccacacaaaatacccctggggaagaaggagatttgactcctggcttgcagcctgtgtagggccaccaagtgatcaggtggggtctggggtcagggaatcctgggcccagctgctagttccatcacttacaagctggtgcttgctgagctcacttggtacctggggatggtcctagcatcttatgcacaggggttaggctccaggtgaggttgcagatcttgtgctggttggcatggactggatgcatcaacaagccccagagaccaggagatatcccacactggaaagtattcctcatgcatcaagtctgattctgctgctctccctcagcaggaggatctactccatggggtgactcagggatccaagctccctccaccgtaatttctcaagtagacatctaggcagcagacaggggagggcaaagccatttctggacacatagctctcctctccttccactggtgagcagtgttccttgcaccctcctgcacacaaagggtcatgggaagtgcagtctctggtagggggtcagccaatccccaggaccaactccacaccctggaagaaaggtgcaatggtctgaatttgtgtgtctccccaaaatttacatgttgaaaccctaacccctaaggtgatggtattaagagatagggcctttgggaggtgatgaggtcatgagggtggggcctcatccataggattagtgcccttatgaaagggaccccagagagctccctcactccttcctccatgtgtgggcacagcaagagggctccctctatgaactgggaatgggccttcaccacacactgactctgctggcaccttgacctcagccttaccaggctccagaactgtgagcaatgaatgtctgttgtgtataagccacccagtctgtgatattgttacagcagcccaaaaagaaaacaagagtttgagcggaggctgacccccctgctacccaaagcccagggtggtaccagcacatgtagacatcaggtacaggtataaaaggttaaattcccagtgtttgggggggcatttctgagccatgacagtaacagaataaattgccacccctgcctggtcccagcgatgctcaccccttgctgggatgattgcagaggtctccccgcctcactcttgctccatcctccctgccccgagcctgtttgccacgcagaagcccttcacgtccctcctctgaccataaccctccatggccaaattatattcaaagacatacagactgtgttggaataaattatattgaaagacatacagactgtgcctatttgaaccagatgaagttctaagggctggagaaacagctatgaacaagacttacaaaacccctgcccttgtggggttgatgttcttctgggaagtgacaattttttttaaagccgtggagaaaaaaatctcagaaagaggagggtactatgcagagggtcggggcaggttccagatttaagaaggtggagtggggagacccgctgaggaggagacaggaaagcagaaactcagaggcaggacaaggcgggtgaggatgtgggggaaagtgtttcaggaagaaggaacagccagggcagaggcctggggttttgcccacgcctgaggcagagtgacaagaggacagagaacagatgggggctggatcaggaggggcgctggccggcggggtgaagactgcagcttgatgggtgaggtaggagtcatggagggttatgggcagaggagggacatgatgggcttctgtgtggagaacaggctgggggcagggagaatggagcaggggtgaagcggggagacccctgcaattgtcccagtgaggggtgagcatggctgggaccaggcaggggtggcgagaacgtgatggattctgggtaggttttgaaggtaaatccgtgatacaatggactttggggactcggggggaagcgtgggatggggaggcgaggtttagataaaagacaacatacatggtgcagtgtgatgggtgcaccagaatctcacaaatcaccactaaagaacttattcgtgtaaccaaattccacctgtaccccaataacttatggaaaaataaaataataataataaaaagaaagttaagccaacaggatttatgatccaacacagcatccgactccactgtataaatcttgggtctccaataggaaagcacagctccgaaggggtctgggctggtgagcgttgcaggctgaattgtgccccccaccaaattgatgtcctaaccccagtacttcccaatacagtgactgtattgggagatggggcctttaaccaggtggtcaaggtcaaatgaggtcacaagagccagccctaatccaatctgctggtgtaattacaaggagattaggactcagacatgtacagagggtcgaccatccacaagccaaggagggaggcctccgggaaaccaaccctgccaacaaatgatggtgtgtcccttcggggctaaaccccaagaggcctctgtgctctctcttactctcaggtccctgctcagccatgtgcactggcttgagctagcttgctggaggttgacaggcccatgggggaagtcatcctggtcaaaggtattctaggccagccagcacaacccccagcccacagtccaagctgtggacagatacaggagcaagtccagccaagatcagccaaattcagatcagcagaactgtctagctggttcataacttcatgaactataataaataatggttgtttctgttttaagcttctaaatgttgccatggttggttatacagcaataactaactgatagaccttcccagagcaatgtctttattggtactcccaccaccaatgtataagaacacttatctcagttactccctgacccatcctgaggaataactgcaaacttctgattttttagatcttcaagggtccagggtgggtgtgtagagactgcttattgttccccaacatctggtctctccttcttccatagtactagaacccttacattttagctgcatttcccagtctcccttgctgctaggtgtggccatgtgactaggttccaaccaatgaggtataagtagcaacatcatattgccacttccaggagatggactactgcattcagattctggttttgccacttctctgttgaggaactttggaaaggtgacttagtttctctggtgcatcagtttcctcatctgtagagtggggataacgatagtatctgccttatagtgttgtcaagaagtgaagtaacacaatgatgcatttagaacatgcttatggctgaatgtggtggctaacagccagatgtggtggctaacgcttgcaatccgagcgctttgggaggccaaggtgggcagatcacttgaggtcaggagcttgagaccagcctgggcaacatggtgaaaccctgtttctactaaaaatacaaaaattagctgggtgtgctggtgcacacctgtagtccctgctgctcaggaggctgaggcatgagaatcacttgaacccagaagataaaggttgcagtgagccgatattgtgccactgcaatccagcctaagcagcagagtgagactctgtctcaaaaaaaaaaaaaaaaaaaaaaaagaacagtacttacacatgggaagttttgttatgtgttgttatcattatcagtataataatactttcattttattttttgagaatgggtcttgctgtatcccaaggctggagtgcaatggcgtgatcatggctcactgcagcctcaaccttctgggctcaagtgatcctcccacctcagcctcctcagtaggtgagactacaggtgtgtgccaccacatctggctatttttttttagagttttttgtagagatgggatctctctatgtttctgaggctggtctcaaactcctgggctcaagcaatcctcccacctcagcctcccaaagcattggggtaacaggtgttagccaccacacccagccaataatacttttattatcagctcctaaggttgatgtaaggtttaaatatgaccaagctccatgtctattatcagaacaagttttcctgatgcttatttgtctaccaagaccaggaagaaatattaggaattatatccatccatctactccctcctccccagcaccaccccatgaggctcagtagattttccatttccttcgtgatacgtactcatttgcccaataaatctttttcaaagcatgaaaattcatagggggatctttttggcccaaatttcttgtaagagatgcctacagggaggtaaatgttcatttatagcttatcacctgttttacagagaggttgagaggtggaaagaaatggagggaaggaagaggtaggagtgaagttggcatttttcattgttgatccaatgtagcacacagacgttggtgtgagcagatgcatgtggaaaggaggaggagaaatttgggtcaggaaggaacctgagctatttttttctctcagtggtgggtgagtagctgttttaaggaaaaagaaagtggaaaaaaggaaataagagagtgaatgcctaatatataaatactcagaacttctgcaccctctgataagtaggaaccccaagaaacaagaagctttgggggtgaacggggtgtcgttcattcaataaacatctgagcacctattctgtgccaggcactgttgcagggtctgggaaccgagcaatgaacaaaccaaagtcttttaccatatggaaccaccactcctaatttctgggcatgatcagagaatgggatgaaatggagagtgaaggggaggccgcctcaacttcagtggtcagagagggccactctaagaaggtaacatttgagcagagacccacttggcaaagagaagacagttacataggtatctaaggaaggcattctcctttcatcaaagtgttcactgatgctttgcttagaagaattgacaacacccaagagtccatccttagaagactggctgaatgtatcaggattcaactgggtgagaaatgagttgaatatttgaatatggtaggagttctgaattacagaattaaatgaaaacaaacagaacaatcgatgacagcatatatgtgtactctcatttgtgttttctttaagtgagggggcttcaggggctttcactcagcagctatttacctactttcacagaaacatttcaataagttagcaacctatatagaagtagtagtgctctgctaattatcagttgtgtatataaagcgtatcagtcagttttgctgtgtaacaaaccactccaaaacttagtgacttaaaataacaagcattattagctcatgaatgtggccacaggggctaagttaaactggatagttctggcctcagctgacttcatgtgttcaactgtggtcagctgtgggctgcctggtccagaataaccttgtccgagatgactcgcctctcctccttgggcatctcatcctccagcaagccagctcaagccagtgcacatgactgagcagggatttgagaggaaaagagagcatagaattcttttgaggtgtgtgtgtgtatgcattgatcctcagcctcacttctcccatacatagaatgaaccttgttattattactcattccataataacaatgccagatgcctatcagccgcaaactatgagatatgcactgttgttattggataagttgtgataagtaaatttttttttttttgagacagagttttgctgttgatgcccaggctggagtgcaatggcacaatcttggctcactgcaacctctgtctcccgggttcaagagattctcctgcctcagcctcccaagtagctggaattacaggcacccaccaccatgccagcttttttttgtgtgtgtgtgtttagtagagacggggttttgccatgttggccaggctgctctcgaacttctgaccttggctgatccgcccacctcggcctcccaaagtgttgggattacaggcttgagccaccgtgcccggccagtaaataatattttattgatgctgagttgttagttatttacattttaatatttctcacattgaaatatgtcttacaattgttcatatctttggcttttcttcttttttccttacaaagttcttaacttctttattttataagcaatacatctgaaaggaaaatcatcacattcatggcatatcatagtcaggaagaaaaattaggttgcatcctgaggttgaccaaacataccagattcaccctgttaagtcctggtccccaaataaaacattgagcacttcctgtaagccggactccttagcaaaaaaaaaaaaaaaaaaaaaaaaaaaaaaatatatatatatatatatataaaatgattaccacatccagaaagtttgtgaactctcttcaaatatcagcatggcaaaactcacatatatatatatataaaatatatataatatatattatatattatataaataatatatattatataatatataacataaatatatatataatataatataaatataaatatctatctatctatctatctgagttttgccatgctgagatttgaagagagttcacaaactttctggatgtggtaatcatttaatattattaccgctttttttttttatcatgaaagaacaaatgtaatgttggtaagcctggtaatcttgtgattttttttcttttaaataccttttgtgtttttaacttgagaagactttatagacatatctatgtgcccacagaaaatatcgacattgttttatgtgttgctgggttttcacgtcattcatgtcagactgcatctgtagatttgcaacttgcttcccccatcctcccatgaaatgatgtgtcttggagaccttttcatatccatccacgatgatctattttgttctgtaaaatgagtataataacaacactcaaccaacatgatcttggtgaggacacattaagctctcaataaatgttacttgatttataatgattctgtctttggaatcatttttctagcgagactgcagaaaagccctgtgggctggaagtggctaggagaacctgtttctctaagcagacttgacagctcgctgcccttgtatgatttaccccatacacccccaagtgattgtatccttctaggttttaaataacaaggtgagttttcccatttcaatcatacttcttccccttgcaatcccaccttaaataaatggaaaattttttagtagtagtgaaacaagaaggtctttggggacatatcgctctgggtttaatcctggatatgccatttacaagctgacctgccccagggtgtccgaggctcccaaatgatcacagtttggagatggccacgtacactagatacatccacacaatgtgattaattccctgcagttgccaaaaagcatgaaatagattcctctccttgtgggatggtccctactgataggattccctgcttggtgccacagaaccctgccttatgggccacagcagatgtaccagaggatagaacaacaggtcactggcccatgaagtggtcttatggcaaagtcttactcaacaggggtctgtgatcttggatgtctcgatctggcagatcatagacttcatcctgccaactgacgagcacagttcagttcaggtcacgtcactcattttccttttaatttaatgaattaccatcattaaaacattgagatagtttacatttacaaacaccgtttttcattcattcgactgtttcaaaacaacattcatgggccatctggtatgtgccaagacacgttccaggttctggaggctcagaggtaaattagaaacacacagcccctaccatcatgggtctgtaccattttagaaacaaggcagacagtaagcaaaaagaaatattcataaagtaatgagctccagcttattttgagaaattgaaatatcaaaactcactgggccagcaactccattagaggacataatagaaagatagtgaagagccatatcacagtggttctaggtaaacaaagagctcaaagtcagagcctcaaagctctctggcccttgaaaagttgtgaatatcatcctattaggcatacaggatatgcttcaggcatactgggtgtcacctgcaatgtccagcacgtagtgagtgctttatgaatgtctgtctcttgagtgattgtggaagctgtgccttttctggtgaccagatcattgggaagaacacttattcatccattcaacaattccagagagatttgattttgtgaaggactcactcttgcagagggtgtacaattcaaaacccacataattcaagactaaccctgacaaaaagatggtgggtgtgtctattcaccagctaaagcgacactaaaataacagtcacagtttacaatgtatgtgattggttgtatttggaagcatgagaaactgtagccatgctgcatttctgtaaatctacaataacatccctcttgtgaccccagcttgcaacataaaaaatagcgctttgccggctgggcgccgtggcttacgcctataatcccagcactttgggaggccgaggcgggcgcatcacgaggtcaggagatcgagaacatcctggctaagacggtgaaaacccgtctttactaaaaatacaaaaaagaaaaaaaaaattagccgggcgtggtggcgggtgcctgtagtcccagctactcgggaggctaaggaaggagaatggcgtgaacccgcgaggcggagtttgcagtgagccgagatcgcgccactgcactccagcctgggcgactgagcgagactccatctcaaaaaaaaaaaaaaaaaaaaaaaaaaaaaaaaaaaaacctagggctttgccaataactcgcatatatttatatagccctctcctccccactccactgcttctcccaacccagaataaccaacagcctgaatccggggcatacctttctctgaatttcctttctgtactttccccctcttcagagctttttgggaaacttcatgttaataatttcaatccggttcagccaggccctgctgtcctaagaacaaaagctgtcacttaaaaatgactttgcagttgttgccctcatctgttttcatcccatgatctctacagcccagagatctttgtttccaggaaacagcagggctttccccaggcggatgggttctttgaaggagggggaaaaaaaaaagtcttctccagctattctgtgtagagcgtcagcaccaccgaacgctaatgcttgaatggtttagaactgcggacagctcacgccagacagattcagcaccacggacagcccccaaggcagctcgtgatgtgaatggttcagcaccgcagacagctcaagcctcgccggacagccctgctggaagtggttcagcaccacggatagccccgctaatatccatcagaaccccgggcggctcaggccagaatggttcagcaccacaggcagccccccaggctcgcaggacagttccccccagcctcgcagggtagcctgtgctgggactcttccggtatcacgaagagccctgctggactggttctgcaacatggataggaacaagtgtcatttcgccatcacctgtgctagatgtagacgctcttctgagctgattcctgagccccctctgcaactttcacctctggagactctgatggggctatctgggtaatccaggctcttctggagttgacctcagaaatgcaggcatccaacagttaatatgcccaaaagggaactctggattttccccacaaaataaacttgatctcacttagggcacttcagggcactcagttgctcaggcccaaagcccagaagtctcccttgattcgtctctttctgtcacacctcgcactccacccattagtgagtcctctcagctccacctgtagagcaaatcctgaatctacccactgctctccatccccattgccactgccttactccaggccaccgtcgcttctcacctggtttactgcaagagcctcctaagtgatcctcctactttaccgccccttctagtgcattccccacacagcagtttcagtgagccttggaaaatgtaaaccagagtctatcataccattcctcagtacctgccactatctccaatacacctataataaaattcaaagatcttcctgtggctttcatgactctggatgcctatcttttttttttccttttgagatggagtctcactctgtcgcccaggctgggtacaatggcgtaatctcggctgcaacctccgcctcccgggttcaagcgattccccttcctcaggctcctgaatagctgggactacaggcgcgtgccaccacgcccatctaatttttgtatttttggtagagacggggtttcaccatgtcggtcaggatggtcttgatctcttgacctcgtgatctgcccacctcaacctcccaaagtgctgggattacaggagtgagccaccgcgcccgggcgcctctctatcttacatcccatgacactctcgctttcctggtcacactggccacaccacctccctgttggttcctcagggcctttgcctctggtgtgctctgtccatggtgctgaactcattcaagtgtggattcaactataactgtctcctttccaccatttggtccttagctcaaaatatgaccttttctaaaaggccttccctgaccatccccacctaaagtggcttcaaagttactatcacagtgatttatttcacagaatttagtacttcacagaatttagcacaaactatatttcattttgcatttattggtttacttgacactgtctgttttcatcattagaatgtaagctccattaggccacagacatcagttgccttagctacccggaacagcatcttcacatggcagttgtttaataaatattagttgtatgagtgaatgaatgaatgagtggatgaattctcagccctgcattaatttttcttttcctggctagtcatggagccccaaaaagatgtcaacagcacttacctcctggtaaaattgtggtccagggtttgtgttggggtccccaagatcatccgcaggtttgatgatttcctgggaggaggactcaagagagactcagcacatagtcatactcacggctatgatttactacagtgaaagtatacaaagcacaatcaacaaagggaaaaggcccatggggataacacatctgtactccagcccttggcttgctatgaggctatggcaagacagagaatgtgttatgttacagtaggataatgaagaattggaaccaataattcaatctaccacacgtagtggtggcatatagctataattttttaatcgtgattttatttcccttttaggttatggcacttgaaactggctttccacttataggagtgctgtaaagtttccatttaaaggtacttcttaaatggttttagaaaatgaattcattttaaataaaaatattaagtaaataggaatgcagggatgttatgtgtaaatgaaagcaatcatgaagatgttactcattgctgcagaaacagggcaaacattgaaaaagggtgtttgagaggttgaagtttgagaaacattaaagacataaaacaggattccagacactttcccttcattgttttcttctgtttagggaagaaatcacctctaaggggtcactcagtaacattcctttcggccaggcactgtggctcacgcctgtcatcccaacactttgggtggccgaggcaggtggacgacctgaggtcaggagaccagcctgaccaacatggagaaaccccatctctactaaaaatgcaaaaattagctgcgcatggtggtgcaagcctgtaatcccagctactcgggaggctgaggcaggagaatcgcttcaacccgagagacggaggttgcggtgagccgagattgtgccactgcactccagtgtggacaacaagaacaaaattccgtctcaaagaaaaaaaaatttgttccctcagaattctggggaagcccctcaaacttgagtccattttgaaacaaccataattcatctggactatcaggatcataactggagatttttaccccatattgaggacctgctgttcaataattataatgataataccagtgacatttactgagcactcaaaattaggaggcatatgtattaacctatatgatgttcacactaaccctatgaggtagaaaatattattgtccccattttgcaggtaaggaaactgagaccgagttaattcacttcccaaagttatacagctagtacattgttagatctgcatctggatgcccagttcctaaccctctcaagactctgtgacctggggcagctcacctggtctcctgcactaaatgtcttgttatcaaaggaggtgatgaggattggatgaaatgtctaattcttgacacttcatctctcttctctgcacactctgaactatctttggaatggcaggaaactcatcttctaaacatagaaatgaagaaagtttcccatcccaattacataacctatctgaaaactcgtaggcaaacccaatctcagtccttccataatcttactgtgtgtcctttgtacaactcatttaactcctttgtgcctcagttctcttctctgttaaatggggataataatactaccactttgggctgttggaattaaatgagataatattaacgagatggctttccttgtagtatttttttgataaatgacagttatttttgtttttctgaataaccagggtaattcaattttctatccattagggaaaggaggttaaatccttacctcataccattcaaaaaaattccagaaggttcaaacaaaataaatatataaaataagactgtaaaatataagattatacaggaaaatgtgtttatgagagtaaggggaggccaggagaagtgattcatgcctgtaatcctagcactttggaaggctgagctgggaagatcagttgaggccaggagtttgagaccagcctgggcaacatagtgagaccctgtttctacaaaaaatttaaaaattagccaggtgtggtggcacatgcctgcagtcccagctactcaagaggctgaggcaagagcatcacttgaggccaggagttcaaggctgctgtgagctatgatcacactactgcactccagcctgggtgacagagtaagaccttgtctcaaagagacaaggagggggaggaggggcggggaagagagggagagacaaggctgaggaagggcatcttaagaccctaaaagcaaaaaataaataaataaataaaaaggatatcttgtatttttattaaaattcaaaacttcaggcactgtgtaaacacaataaaaacataagggaggagccaggagaaaatatttgccacagatagagtaacaggcaaaggattaatgtgcagaatatagaaagaatgtctattaatcagtaagtaaaagctacataaacaaatagaacaatgcggagaggaggagataaacgggtaattcacagaagagagaataagcctgttcaaatacatgtgtttaattctcctcactagtaatcagggaaatgtagctaagatgatgcagggacgccgttttccccctacctatggctttgccgaaaattttaaaaatttaatgtagcctccatgagagcaacttggctgtagtcactgcattgtaaatttgaacaacaatggtcattgataataatagcagctattaggcactgttgtaagaactgtacgtgtattacttattattgttattattgttttactttcacagaaatcctgggacttggtaaccataattattcccacttaacagcatgggcaaccgaggcacggaaatgttaagtaacacacccgaggactcactagtaacaaatggcaaagccagccgctgccccaggcggtcgggcctcagggtccccgggctgccaccccctgccccagctccttctcccttccgcccaccccggactcccggtttgcagactggagaaccacggggggcgtacgcaaagccgctggccttggggcgtctgtcgcagggtacctcgaacataacctacgtgctcatcagctagagatggaccagctcggtaccacacccccctgcaaccacgccgcgggtaccccgcctctgcggctcatccactcccttccccacgcgcctccaggtgcaggcttcccgggggtggaggaggggaggaggacacccacgctccccaattcccccacctcccatctcccacctccccccacccccccgcagcctccgcgtctgcgcagccgcagtcagtgcggcgccagctctgcagagcccagacagggtccggttggggagggtgagtccttcgagggacccccgcgggcgggaaggaggcggagaaaaggggctgggggcgcgggcggcgatccggggatgcgcgcgcgagtatggatgcgcagagggtgtgtgtgcctgggcgagggtgaggggcagaaccgctccagggatagggtccggggagagggcgtctccaagcccgtccggtgggagaggaccggggtctgtcggggtcgggtctgtttctccgcagcggaggtctgtgtcctggcttgggggttgcaggtgaattccagcctcctcgtgaggaggggagcacagacctgtgtaccctcgtggggcggcacgggcacgtgcgctcgtctcgctggggcttggtgtcgatgttcgctccccctggggtgttcagcgcacctgcccgagtgtgcacctgtgcgtgttcgcgttgtgtgtccgcctgggcccctgtggaccaccctgcaacggtgggagcgcaggctctcagcaaacaggtgcagcagccccgcccccactcttctgagctgtgtggctttgatcaggggacttccctgtctgttaaatggaaacctaatagtatctgtagcgagaagtatggccacctttatgtgagaaaagggattcgcagggctcagcagggctgggcacaaggagagttctgggctccgggaaacactgccggtatttttattgcttttactgtggttgctggttgtcgttgttgtgactgcgtctccattctctcaggggatgacttgtttgctatttcaccatgaacactgaggctgtggggtgtgaatctcctccccccaccatacctctgtctcatcccctttccttcttcctcctccattcactgcggatccagcttctcctgaccttgacctgatggctgtcgtctttcccatctgtcaccccgcttgcctgcattttctcctttctcatgccttcccctcccctcaacctagatccatgattaattatgtctcatattaaaaacaaagccaagcaaaaccccaaagcaataaacaaatcagaactccctaatggtactctctaacactctttcccacgaaggtcccataggaattttcttgccctgaaaaatgtctaggcagcctcctctcctcactcccaacagactccccggcccacactgaggttgcaaatgggcaaccccagggtctaattcagccccacaacttgtgctatttgactaaaggtgtcttcctgttaaacactggaaataattattgacatcatgaaatgtagaaaatgccatctgaaaatatagatttccagtcttcttttgagaaatcacaggatgggcgacaccagtcccatgcgtttgctctgcagacattagctgagttgcatggtgcagcttcttcagacaggagacctgatctctcttgccccactccccactgcctccgtcgtctctccccatgccatatatccactgccatttgttcatgtgctccttacaatagagaagtatttctctggacctatatttaattttcatttgtagaaaagtgacagtaaaagagtcctcttgattgactcattgattgatttttgagagagtctttctctcttacccaggctggagtgcagtggcacgatcctagctcactgaagccttgaactcccaggttcaaaggatccttccaatatctgagactacaggctcgtgacaccacacctggctaatttttaaactcctgggctcaagcaaccctcccaccttggtctcccaaagtgctaggattacaggtgtgagccacctcgcctggctgatttatttattaattcatgtcgtttcctatcccatttgttatatacaaatgtgcagactggagaatcatgtgtggctgtaggtgtgtatatgagtatgtgagtgtgtatgtgtgtgagtatgaatgtgagtgtgtgtgactgtgagtgtgtatgagtgtgtgtgttagtctatgtgagtgtgtgtgaatgtggatgtgtgtgtgtttgtgtttgtgttagtgtgtgtgtatgtgactgtgtgtctgtgtgtgtgtatgtgtggatgtgtttatgtttgtatgtgtgtatatgggagtatgtgagtgtgtgtgtctgcatgtgcctgcccatgacaatcactccctttccagctttgtctccagagcaccctctagcgtttgacctgctgtgtgctttatttgttccctgcctgtctctttgtctccctactagaatgtaagccccaggagggcaggaatctccacttgattactgctgtatttctaatgcttacagtcgtgcctagcccctgctggccctctgtaatgattcactgaatgatgaaatgtccatcagtcctcaggttctgaatcttgtgcctggagaaccagagaggaccctggagcaggaggagaaagagaagcttgtctcagaagctccacctcctcctggggcaatgcagagtctcaggcctgagcagacacgggggctgctggagcctgagaggaccaagactctgctgcctcgggagagccgggcctgggagaagcctcctcatcccgcctgcaccaaagactgggaggctgtggaggttggggcctccagccatgacagtgatgagaaaggtgagaggcaggggtcctttgggaggtgagtgggtggagaggaaggaattggcagagcctagggaaagactaaacattcactccttcactcatccattcaacagctattcatggagcactgtgtcagtcagcttttgctgtgtaacaagtcatccccaaacttaggggcttaaagcaacaatcacttatcagctcatgattctgtgggtcagaagtttgacctggcttcaggggacacttttcctgcctgtgcttgtctgtgcagcctcagagagctggtgaggccactggtcgatctcagatggctttacccccatgtctgctggtgctggctgttggctggcttggtggtgctgaggacaggccatgtgtctccagcaggatttttcagggttatcctcatgggggtgcttgcagggttctcagggatggcaagagagggaattccccaattttcaagcactggaagatttgaagaggaaaaacacatgatctcatttgcatttcaaaaatattcctctaactcagtggatttcaactgggcgtggtcttataccccacttctcctccccggacgatttttggcagtgtctggaaacatttaggattatcctaactgtggagatgctgctgttatcttgtggggagaagccagtagtgatgctgataaacgtcctaccatgcacaggacggaccctccccccacagaaagaatggtgcagctccaaatgccgatagtgccaagtttgagaaaccctgagtctcactgcatgtgagaatggattgtagggctaggaagtcaagaatggaaggtgggaggccagttaggagattcctgcaactgtccaagacagaggtgaggtaagtggagagatttgggacatctttgggagaaggaatcagttcttgctgatggatgtggagaaggggaggaaacgagaggtatcatgatgacttttagggttttggcccaaacagatggataaaggatggtgccatttgccgacatctcaatgacaccccatagcagaaaggggctgaaccttataccaactactaggcactgtctttttcctcaggggatgagcagggctgggacagaaggagtggataacagaggccagctctgctagtgaggcttggagctcctggctggggctaaggtgcagaaagagtggaaaatgccaggatttgcccagtctattcagcttagggatgagaaggacactaaggttctgactatggggacatgtccccactagtgtctgttctttggaagctggggaagcctccatcatcctggtttacttctgtggctttttcttctgctccttcactcagtttctgctgggggcctgtagagaaggaactcttttatctactggacaggtaagggactgaagactcaagtggcagggcacatcaggtgacccagttgaagttttctaggtagttatagaacagaattcaggtctttcattctctcagccccatctgaatcatcacataggcatatgtgtgtttgtgtgtgtgtggggttgtgtgtttgtgtgtgtgtgagagagagagagagagaaggagggtgagagagagagagagagagagagagagagaggaggctattactagaaaagggacaagatgccagtgggaagagcccactcctgccatctggccactcactcatggctcctttttcctccactcccaccctcacccagacctgtcttctcaagagactgggctttcccaggagtggagctcggtggaggaagatgacgaatcagagggctcccaggtacactggggggtttgttctttttccacaaatgtcccactctgtagatctcagcactttgtcacatttgcattctcagcttggaatttacctgccccataaaaatctcaagagatctcttgtgtctgatctctatggtgatcagacacagactggagggtctccatgtggtgtgtgtaactcagttcacatgtaccctccaacacttccttcataaatccatctacccatgcatccacctctgtacttcatcttctgtccacttattcatcaaccctcccttccatccaccctcttacctttccaatcactcatccattcattcatccacctctcaaacatctactagccattcactcatctgtccactctttcatccacctaaacttttattcacctacttgcttgtatacccattccatccatccatccatccatccatccatccatccatccatccatccatccatccctatacttcatctgtttatccacttatccatccatccatccatccatccatccatccatccatccatccatccatgcatcaacccatccctatacctcagctgtctatccacttttccatccacccataaaccctcccttccacccaccctctcacctttccattcacctgtccattcattcatctacccattgaacatccaccaactattcatctgtccactcattcatttacccaacctttcatcccttatgcatccatatacccattccatccatccatccatccatccatccatccatccacccattcatccatccatatatccagttatccatatacatactcattcacccttttattcagatgccatcaatccatctgttcaatccacccacctacatatccatcccctatccactcaactgtccacccacctattcatccctctactacctgttggctgtggtgaggatatggctagtatgcatccacccatatgcccacacattcattcatccatctgtatctattcacacacccagtcataagaccacctaccaatccattcacccatccacccactattccatttatccatccactaatcatctactgagttttaatccagatactacaagtaaaaccaaagacaattatcaaacacatttctttcactcaaaaacctaatgttttcttttttgaggaataagatatcaatataagaaaaccagtggttctttcatttatacattcatctcatacatgagaaaaatcacataatcactctcagtgagcacatgagagtcccatccatctcccaatcatgtcaggaatgtaactctggctgcctcaagccagaaaatggatttattggctcgtggtgcagggatgagggcgagggaaacaaactggccaacaaaccatgatagtgcagaaataagtgctgggcacagtggagtggcccaaaggaagaagttaactgcatgccaggaggtttattcttggatatcccagagaggaggacacaccacacctggagttttcgggatagtaagaattccacaggcatagcagggaagggaacaacatgtgcacaggcaagttggtataacaaggtacgtttcagggacactgaagttaagggcagagcagtgggaggtttgggtgaaaatatggctgggatgacatcattcactcattgcacgtctatttcttgagcacctgctcagtgccaagcagtgttcaatgcacagagtgtacaatagtgagacagaagtggtccctgccttcatggagctcacagtcaccgaggtagacagacgacaattgaaataagcagctaaaatatgaattgggttgagtggtgataactgctatggagaaaaatgaagcaggaagggggtttgggagtaggagctggggctgggggttgctattttaagaagcttgtctaggaaagtccccactgagagggagctattgagtgaggacctgaaggaggtggggagtgagactggcagatgtctagggagagcgggctctatgcagaggacacagcaagtgcaaaggccctgaggtacagatgtgcctggtacatttggggaacaccaaggggcatggtggtcagtgtggctggagggtgggagggaggactaggaggtgaggtcatgggggcgatggggtggatgatgtagtgtctcatgggccatggtgaaatgtgagttttactctgagtgggtgggagccataggcgagttctggacagaggagggacatgttctgatttggcctttagcaggactcctctcactgctaagtcccacaccgaggaggttggatgtgttttgcaggcagtgggagccatcgaaggtgttcggggacttacagaatcactctgggagcccatgtggaaggaaggtgggttggatgtggctggggttagagtttagaggggcaaaggagcaagtcagaaatgtatagttagggaaaaaaggtagaaatgaaacagagaagagttgccactttccttgtgcatgttacaagcttcatgctattctttttattttttatttttttgagacggaatctcgctctgtcaccaggctggagtgcagtggcactatcttggcttactgctcactgcaacctccgcctcctctgttcaagtgattctcctgcctcagcctcctgagtagctaggactacaggcgcacaccaccatgcccagctaattcttgtatttttagtagaaatggggtttcaccatgttggccaagatggtcttgatctcttgacctcgtaatccgcccacctcggcctccgaaagtgctgggattacaggcatgagccacgacgcccagccagcttgatgctattctaagctcatcttattataacacatctagtaactgaacactcattaactctcataactcatgagccttgtgagattgttagcatggtttcctcctctacagatgaggaaactgaggcagagaggaaccaaatggcttgcttcaggtcccacaatgagtgggtagcagagctagcatagagtttgggcttggaggggaggataggagcgaatgggacccaggacctgatgacatttccagacctgtggaacgtaaaaggtgaaggaacagggacaagcccaggggcaacacgtgaattctgatgtggggacagggtagagggaggttctagcctccagcatagggatcaaggaggcagtttggaagaaatgacaaggtcgattttagacatgctgcttgggagaggcctctgtgacatcattcattcactcactcgtttgcccagttgtaattccttgagccagcattgatggagcacacaccagggggctgataggggagggcctctcattggcaggccctgggtcagttttctgcatggacagaccctccttcctgcagacaaccaccctctttcaaaaaagaaagaggagcgggctgtctggaaccagagacctttgatgacagttacagcctcattatgggccaggagctggactttgtgctctacttaccttaatttacttggtactcttatcagtccttgatgtaggacctgttatcccattttacagatgggaaaactaaggcacagagaggttatgtgactttcccttgtcatgcaacgtgtaaatggcagagctaggatttgtacccagcatgtctcttaaccactaggtgtcctgcctgtgcttggggcagagatgaaggcctctctctccctgttctcctagtcactatacctcctgtggagaggagtgagtgaagaagtggaagaaagaaaaagagttactttccgggagggcagaagttcccagtctgtgggcacagaagaaagcaagcaggggaaaatggtcccatcattaccgttccataaaatgcaagcatatgtaacacctgcaaatcttatctaagtgcatgagattttaaaaagatcaatgcccagaaataacccctggtaaaagttgctgtaacaggccaaattcatccatagtgtgagaagttggggtagtggttacctttgaggtggggggatttcggggttgataatgatctgcttcctgtttggggtgctagttacatggtgtgttcaccttctgaaggtgcctcaggctgtacacctaggatgtgtgcaacctcccctttctacattccacttcaacagaatgttttaagctggctgggcacagtggctcacgtctataatcgcagcactttgggaggcagagtcaggcggatcgcttaaggtcatgagttcgagatcagtctgcataacatggcaaaaccccatttctactaaaaatacaaaaattagctgggcatggtggcacatgcctgtaatcccagctactcaggagactgaggcaggagaatcgcttgaacctgggaggcagaggttacaatgagctgagattgtgccactgcactccagcctgggagacagagtgagactctgccaaaaaaaaaaaaaaaaaaaaaaaaaaagttgctgtatatatccttgtatatatcctgccaaacatgtttccctatatactgagactgaattgagatttgtgtgccagtgcttgattgagggttgtgctctcaggtgaagcccagcggggagtgagggaagctggagaggggaggagagggagccaggcaaatatactggtagaactgaaatccagtctccgtcttatcgcaagggaaccctggaatgtgaatagagagttgtcctcctctgggctgggcgcagtggctcacgcccgtaatcctagcactttgggaggccgaggtgggtggattacggggtcaggagttcaagaccagcctggccaagacggtgaaaccccgtctgtactaaaaatacgaaaattagctgggcatgggggcggatgcctgtaatcccagctactcgggaggctgaggcagagaattgcttgaacccaggaggcacaggttgcagtgagctgagattgcaccactgccctccagcctgggcgatacagcgagactctccttctcaaaaaaaagaaaaaaaaaagagagagagagagagagttatcctcctctgagtcagtggagtggccttttgtatcccatatgagttattgttggctgtggactgccctggagggcgaattaacctcctgggtaatcctctaggaaggaggatctcattagcaaagggcatttgtcagaagagaaggagcaactacaaactgtaaaccatacaagtagcggccaatacccctagcctccaggggagagctgcaccagcctgaaaaacagaaataaagagaaattaggtgaggcatccatgggtctattatgtgtgatgtgtgtaaaactattggatttcagattacctgtatttattacattttcttaactttatattctgcttttcaaaattgaagtataattatttccaataaaatgcactaaccagagagtgtttacacatgtacatccgtgtaaccaacaccccaatcaagatattgagtgctgtcataattctagaacattctcttattttcccttctggtccatctcactccccagccctggaagcaactacagttcttgatttccacttgcatggattagttttgcttgttgttgaattttatctaaatactgtcatgtagtaaactacatatatattttttaattccaaaaaaggaaattatggcaaaattgttattcctccagttggcattttcacttaatacgtgctggacagttttccatttaatatatattgattatcttcattgtatttcaaagttactttttcctgctgccaaatattctctagctcagttgtgtcagacccatttccttgggtgatgaattgctaggctcccattgctgtcactgttacagaagacaatgctacaatgagcgtttgttcagttggcccaattttacgcatggattatgaggaactttataaaaattcacattctctggttctcctcagatacactgaaccagaaaatccaaaggggatcccaagatattcaaaaacctctcccaacaacttttggtgctctaccaggtttgggaactgcttaagtgggtcattgtccctaggtatctggttgtaaaggaagatttgaaataaggtgtcatccagagggaatcagcaggctaaagggaggaatttgtttcaaagattataaatgtgaattccatcaatgatttataatatactttaataattcgtagtctgtgtccttccatttttcttttttcacaggatttttttcagtgttcaccattgcctaactttccagataatccattatgtcttgtacattcaccaaacttccttgatattttaatagcaattgcactaaattcatcattaatttggaaaattgtcatcgttaaacattttgtcttctcatctcttatcatggtatgttttttcatttatgaactcattcaacaaatatttacagagttcataccctgttccaggcactgggaatacagtagcaaacaaagcaaaggtttgccctcttggtgcttacagtgtcattggaggaagagacaataaacatacatagcatgtcaggtggtgataggagcatggagaaaaagacaaggggcatgcatagtgcagggttaagggtatctggaggaagggcattccaggaagaagaactcgtaactacaaaggcttggaagtgactgtggctggaacagagtgagaaaggcaaggaatgacgtcagcgttagaaggagcactctgactggcccatgggcaagaaattgggtgggattatcaagacaagaaacaaaattctgtatcaagagtacaagatagatgacagtggctttggccagggtggtggtagtgaagggaagggaaatggtcagattctgaatgttttgaagataaagccaacagtacttgctgatgtcttgaatgtgggtggtgtcagaaagagagtcaaggatacaacaattggaggtctggaggggcctgaaggggtaatgggaggaaaactgcatgaggagcttttttttgtgggggacattacaatatttgtttggggacatgtgaagtttaagatgtccatcagatatccaactggagatggcaaataggcagtgagatatatagttgggtcaacaaatacacatacatatgcaagcacacacatatctcttgagggggtggggtcattagagcatagatggtatgttaaaactgagatttaatataccagtgagattttgaaattgtcatcccattattcgaacatttcctctgagagagcatagttatgttacattcttttgtttatcttatatctactcagttgtaccgttttaaattcaaacagcttttctcttgatatgacatttcatttctgatcatataagtctattttcctgcaagtaacaatggtggccccttcctttccaatatttatccttttccttttttctgtttcagggctttgtggagtggtcaaaagctccacaacaaacaaccatagtcttggtagtgtgcgtgctttttttgttcctggttttaacggggatgcctatgatgtttcacatttaactataatggtggctgttgttttaaaagtttaatttaatgaaatagatgccctatgtcatgttaaggaattgtgctagttaaaaatcaggaataggtgttgaatattttcaaatgcctttcaaacatcctttgagatgatttttaaaaaatttttggtgtgagttttcacatactttatttccatgaaatgaagacatcattgattgtaaaacattattttgtataccacggagaaagaaaagtgctaattaatcattaagatgccaccaactggaagatatctcctgactttgagaagatgaaaaaatgtgcaactgaagatcaatgaaatctggtacatttcctaacatcaaaccaactttgcattcttaaggttttggtgcaccagtcttttcatacactagattatatttattgatattttatgtaggattcttgcctctatcttcacatgtgagattggtgctatctttgtgaagttttggtatcatggttaagcttgcatcatagaaagacttgggtaacttttaccttttctatgcttttcaatagtttctgtagcttaggaagtatcagtcccttgacaccttacatgaattcattgttataaccaggtcatagagtcatggagagaacgtttcagctaattcttgggcagctttcttagttctttacaatgttatcagtttattaatactttttacctcttgcatttattttggcgaattacagaggtttttgtttttttttttttttgagaccgagtctcactctgtcacccagtctggagtgcagtggcgccatctcggctcactgtaagcagagggttcatgccattctcctgcctcagcctcccaagtagctgggactacaggcgcccaccaccatgcccagctaattttttgtatttttagtagagacggggtttcaccgtgttagccaggatggtctcgatctcctgacctcgtgatccgcccgccttggcctcccaaagtgctgggattacagatgtgagccaccgtgcccagcccagagttcttttatcctctagaaaattcttcattccatagagctttttcatattattagcttaattatgcataatgttttataattaaaaatttctctttattttgttctatcccctgtttcctgtaaactgctgtttgtggtttactcgttattagatttgtcaaaggtttatctagcttactattgtttttccaaagaaccaacattaggattcatttatatccattatttcttttatttgtaatttgtttttctttgatatgtattgcatttattttttattgtttttcttctttgtctcagtttttatactgaatacttgatttatattctctttatattttctataatagcatacttattaacgcaaatgtacttctggatatagcgttggccacatcttaacatttgattattcatttttgtttatgttgtctaaaaattacattgtagtgtgtctaaatattacattgtagtgtttctaaagagtgctttgaaactcagtgatttggtttattttttgtttaaaaatagttttgttttcttgttttactgcactgtgaacacagaatgtggcctataacacatctgcttccaaaactttttaaaaagcttttagtgtggcctagaacatgtccattttttgtaattgtttcacgaacatttaagatgaagatatcttctctgtctgtagaactgaaaactttatgtgcctgttagttaactcagtatcgtcaattatattgttcagattcatgtgttatctaattttggcctattatattcattaaaaaccaataaggttatgtgaaactttgttagtacaattgtttttgctaataaatttttataatctttgctttatgtactcaacagctgtgtaattcgaggcatataagtgcagcattgttatgtccttgttaattaaataatatatgtaaaacaccatatgacaatggctggcagatagtaggcactcaataaatgttaattaaaacctgattctgaatcctttgttaaatataaaatgattgttttcagtcaatttaatcctttgccttaaattttaccttgtctaatactggttgatattatcatcctgcgctcttctgtctatgtatatgaggttctttagagaaattaacagggaaaagtatggattatctctccattcctctctcaggctgattgcctgcaacaagcaaccagcccttaagagaaaggaaaacaggccttaactattacattttttgagattctactggaaataagagaagctcaattcaaatgagcttaagcaaaataataataataattattattattattcgttcatgttacaccaaagtttaggataaaattggctttatttacagctggttctgggggacctaaaaatatcactggggcttttcctctcctcacctccctctcttccttctacatggctggagacagctatcatggaccctgtgatcatctcttccacacggcaaggtgggagacctggcagattcccatcacgcacacctgcaactcgcatccttgttctgccttggggacaagagtcctgaaattaggggagagagagcagcaactgcaaaggccctgagacataaaccgactgcccaagtaaaggatggagaatggactgcagcaggtcaaaggcggaagcagggagataagtgtggagactgtcttaggtgtccagtcaacaggggatgggccgggcatggtagctcatgcctgtaatcccaggagggaggccaaggcaggaagatcacttgaggttaggagtttgagaccagcctgggcaacacagtcagaccctgtctctacaaaaaataatagtaataaaaattgtcaggcatggtggcatgcacctgtagtcccagctactcagggaaactgaggcaagaggactgcttgagcccaggaggctgagactgcagacagccatgatcaggccactgcactccagcctgggtgaaagagtgagaccttgtctcaaaaaaaaaaaaaagcacccaaaaatgaaaaataggggatgatgttggggggctaactgggctctgattagctcagacagtgccacaggtcttgactgattttgtggaatattgaaaataatcatggccgggcatggtggctcacacctataatcccaacactttgggaagccaaggtgggcagctcacttgaggtcaggagtgcgagaccagcctggccagcatagtgaaaccctgtctctactaaaatacaaagaaattagctaggtgtggtgggcacctgtaatcccagctacttaggaggctgatgcagaagaatcacctgaacccgggaggtcgggaggtggaggttgcagtgagcagcagagattgtgccataccactgcactccagcctggtcaacagagcaagactgtctcaaaaaaaaaaaaaaaaaaaaaaagaagaaagaaagaaagaaagaaaaaagaaaaaagaaaagaaaagaaaaaagaatcatgatactatcagtaatataaatcacattagcaatggtcttctaattagctctacagtatgccagggacctaatttcattgacgacagaagtatccactcaagccactgacgttccattctctacccgacagctggatagatcccattaaaacataatcaaccagattgggcaacatagtgagaccctgtctctacaaaaataaaaataaaaatattagccaggcatggttgtgtgcccctgtagtcccagctactgtggaggctgaggcaaaagggtcgcttgggcccagaagttcgaggttactgtgagctacaactgtgtcactgcactccagtctgcacaacagagagagaccttgtttctaaaacaacaacaacaataataataataataataataacaataacacaattaggaccattcataatcctcccatttcaggtaaagccaaagtcttcacaatgccatccagccctattccaagtggcttctcttccctcctccttatcttgctccctcccacgcagccacactggcctccttgctgtttctcaaactcgcctatcatgcttacttcaggacttttgcactgttcctgctccgcggaatgctctttccccagaagctcccatggctccctcatctccttcaggtctcaaatgtcacttcctcacagaagccttccccgaccaccctcaagtagcacctctctccgcaggtcccgctctactcgtcttcacagattgtatcatgacctgacaagtaatgggtcaatgcagttccagtctagcgtcctcaatggccattcctgccccttgggtggttctccctggaggaactgtgaagatggaatggggggaggagagggctgtggagttcaggttgtgcctccccggaactcctcacacatccataccagcttgtggcacctccacacgaccccacccccatgctcttgaagctgctccgtctcttcctggctttttttttttttttttttttttgagacagcatctcgctctgtcgcccaggctggagtacagtggcgcgatctcggctcactgcaagctccgcctcctgggttctcgccattctcctgcctcagcctcctgagtagctgggactataggcacccgccaccacgcccggctaattttttgtatttttagtagacacggggtttcaccgtgttagccaggatgatctcgatctcctgaccttgtgatctgcccacctcggcctcccaaagtgctgggattataggcgtgagccaccgcgcctggccactctgtctcttcctttaacagggcaggttggaccagggtggtatttgaatatagtatctagggaacactgtgtagggggaaataagtactagaagttggtaaatacggcaaatctaaaatcacagggattaggccgggcgcagtggctcacgtctgtaatcccagaactttgggaggccgagacaggtggatcacctgaggtcaggtgttcgagaccagcctggccaacatggggaaaccccgtctctactaaaaatacaaaattagccgggcgtggtggcgtgtgcctgtaatgccagctactcgggaggctgaggcaggagaatcacttgaatccgggaggcagtgagctgagatcaagccagtgcactccagcctgggcaaaaagagtgaaacttcatctcaaataaataaataaaatgaagtaaaatcacagggattaagtggaccaccccttgggccagtcatgtggcctgtggttagtaattctcatagtgaaatagcccgattacccgcgagatggtttgggagggattaatgagaaggctgcacgctgccaccagagggcagcttcggcatccagtgctgtgagggttcacagaatcctaggtccatttcctctttaccttatctgtcaatccttacatttcagaagctcagaaatattttggataatttttcctccacggactcagaggactctaacctcccgggtgcttttctctttctacagcaggaggggttcatggcaaattctcatcacccctccctattgctgctctgccactgaacaggcgctcacggcagaccaatctgcccacacccaagacactttccagcggcgccgcccatgggcgtccctgctccgcgggaagctctcaccggcggatgcagcccgacgcctgcgcactggagaggcgccaagccccctgcacctgcgcactccgactgggcggggtctcctcgacgtcctggtggaagggttcggaggacggacgccgatcatgcccactaccacgcccccagccctgccagttccccacagagcgggtttgacccagctctttctgctgctctcttgggtgataaactgtgccccatgtctgtaaactagggtagcatttcacgcattcatcctttcacccggcactgtctgagcccgtactgtgtgtcgaggcctggactgggcgaagttcggctctctgtggtccctgattctgaatggctctagggctggtgtgggatgttcaacttactcattcggtcactcagcttttcttgaggacctactgtgtgctgagaccagggctgagcaaagtttgggtcacaggaagaaaccagaatgattggtccctgaacctgtgggctccagggctggtgctgaggatgttcacctgttcatccatttacttggcctctcctgaggacctactgtgtgcttggcctgggctgggggatgtcgggggtgagggggttaaggagaaactaaatgtgtggtccttgtccctgaatgactccggggctggtgctggggatgtataactcttcatactgtcactgacaattcttgaggacctactgtgtgctgaggcctgggtggtcagtcaggagccaagggaagaaccaactgcttggtccctggccctaaagagcctgggcaacagagcgagactccgtctcaaaaaaaaaaaaagaagaaaattctgcatatcatatgctaccatttgtgaagaaaggtgtactatatatctttccagaatattctatgcatataaatattcatatatatgcttacatatagtaagcatttgcttctagtgagggggacttggtagctgggagacacaggagtaagaacagtttttttttttaactttataaattgtggactacatgagtgtattcccccataaaataattttccaatgattatagtcatgtgaagttatgagattataactttaattcaacattgtagtaggtggattacgttcataactcctacttttcacccttccctgggaccacatgcttaggaaggctcttcctgtgctgatcctaggcttggctaggaggcttgctttggcctgtgggactagatgcaaatgtgacaatatcagagacttgaaagcatgcctgtgtgtccactccctctcagactcctgccacctccctgagaacacacccaggtgagatgtgagtcaggagaagaagatcaaattggcccagctgagccctcctggtccaggtccagaccaagcctggtccagaccaacagaaccagcagctgacctccagatgcatgagaaatagtaaatggataaatgagggctggatggtttgttacacagcaagagctgactgatacaagcattaaagtcaggtctttgagttagggggaaaaatggtggagatgggtaggtgtttcctcatactgaaaaaaagactaggcccactctaaaaatcttttgtagaggagaagcactcccttcttctagaataactttcagctctagatttctcctgctcattttctctaagcactatttctatcttagtgaatccagatttcttcttcagactctgctcctttagtaaatatgccaacttggccaaagaaaccaaaccttttattcactttaattcaattaaatttactgagcaagggcttactcaataaaatcaacaatgaaaaggccagctggccaggcaccgtagctcaggcctgtagtcccagcactttgggatgccaaggcaggcagatcgcctgatgttaggagttcgagacagcctggccaacatggtgaaaccctgcctctactaaaaatacaaaaattaggctgggcgcggtggctcatgcctgtaatcccagcactttgggaggccgaggcgggtggataacgaagtcaggagatcgagaccatcctagccaacatggtgaaaccccgcctctactaaaatacaaaaaaactagtccgggtgtggtggccgggcgcctgtagtcccagctactcgggaggctgaggtaggggaatcacttgaacccgggaggcggaggttgcagtgagccgagattgcatcactgcactccagcctgggcgacagagcaagactccgtctcagaaaaaaaaaaaaaaaaaaattagccagactcctgtaattttaactactcgggaggttgaggcaggagaatcacttgtacccgggaggcagaagtttcagtgagccgagatcgctccactgcactctagcctgggtgacagagagagacactgtctcaaagaaaaaaagaaagaaattaaaggccagccataggtgtttctgcaggtctacttgcccgtgccccatttataattttgcaccaggaagaccgcaggggagtctggcagatgtgaggtacagtcttagccctgtgtcttccccactgtgtgccctcaggcaagttaacaagcttctctgagcctcggtttcctcacaggaagcgtcggggataacacagtatctcccccatagcattgtgaggttggaaaggaggccctcagctcttaatcttctgctggtccacgcgggtttctgccagggcacccctgttgacaggtttctcctccctgtgagagcccaggtgttgagtcaggcgtgggagctgggcaaaggcgtcccgaactgtctgcatgcgtcctctggtgtcggatgagcgcggaggagaagctgaaggccttcccgcagccgctgcactcgtagggcttctccccggtgtgcacgatgtggtgctggatcaggtaggagcggttgctgaaggccttgccgcactcggggcaggtgtagggccgctcgcccgtgtgcgtgcgctggtgcagggcgagcgaggagccctggctgaaagctttgccgcactcgccgcacttgtagggccgctctccggtgtggatcttctggtgctctataagcgaggacacgtggctgaaggcggccccgcattgcaggcacctgtagggccgctcaccggtgtgcacgaggcggtgctggaggaggtgggagcggttgctgaagcgcttgccgcagtcgtggcaggggtaaggccgctctccggtgtgcgtgcgctggtgctgcgtcaggtgcgacacctgggtgaaggccttggcgcactggccgcacgcgtagggcttctcgcctgtgtggatgcgccggtgctcggccagagaggcgctctggctgaagagcgcgccgcagtcctggcacgtgtagggcttctcgcccgtgtgcacgcgccggtgctgggtcaggtgcgcgatctgcgcgaaggccttggcgcactggccgcagcggtagggcttctcctccgtgtggatgcgctggtggcggatgagcgctgaggagaagcggaaggccttggcgcacgcggagcactcgtagggcttctcaccggtgtggatgcgctggtgctctatcagggacgagcggttgcggaacgccttggcgcactgggcgcacgcgtagggccgctcgcccgtgtgcacgcgccggtgctgggtcaggtgcgtgacgcgcgtgaaggccttgccgcagtcggcgcagcggtgcggcttctcgcccgtgtgcgtgcgccagtgggacgccaggtacgagccctggctgaaggccttgccgcactcgtggcaggcgtagggcttctcgcccgtgtgcgtgcgctggtgcagggtcaggtgcacgctctggctgaaggccttgccgcactcggggcacgcaaatggcttctccccggtgtggattctctggtgtaagatgaacgctgaacagtagctgaaggccttcccgcagtccccgcatttccacggcttcttggggcctccacctctctcccgctggcggctgtcaggatgcctctccttcgggctctccccaggcgcgctgcacctccgggaactgctgtcgtcggggacactggcttgggtagcagcagggctcgatatggttcttgggattcggctgaattcatcgcgttcctgcatgctgtccccagcagggtctcccttgcaggccacggcctctggctctggacagctttcctggttttcctgcaggtcctcaacctggccctcgtgtttccagtttccttccaactctgcgccctggagggcgacgctcaagagtccctccatcctcgatccctgggctgctgtcttgatctcacatcttttctctgggtctgaaaagaaaaagatagaaaaaaaaattaaatgttgccacttgtcctgagctggaaaaatggctaacagctgaactggtaagaacttagcatggggtccctggacctctgtgccaatgacattttgggtccaataatttggtgtggtgggacccatcctgtgtgttgtgagatgttgagcagcgtccctggtctctccacactggctgccagggacactacccctcaacccctgagttgtaacaatgaaaaatgtctccaggccggacgtggtggctcatgcctgcaatcccagcactttgggaggccaaggcaggtggttgcttgagcccaggagtttgagaccagcaaactgtctgctgcctgggcaacacagcaagatctcatttctacaaatgaaaaaaaaaattagccaggcatgatgttgtgcacccgtggtcccagctactcaggaggctgaggcaagaggatcagctgagctcagaaggttgaagctgcagtgagtagtgatcacactactgcactctagcctgggtgacagtgtgagaccctgtctgaattttctttaaaaagtctccagacactgccaggtgtcccctcccctggggacaaaattgcccccagttgggaatcactgacttaatggaactaaaaacaaatttaaaagatccctgaaaaagaaaaaaaaagcatgaatctgtcagctcttaaaatatggccctgtaatctggtgctgtgaactgaattgtgccccctcaaaatttatacatggaagccctaactcccaaggtgatgctttgtggagatggagcctttgggaggtgattagctttagagggggtcatgagggtggggcccccacaatgggactgttttattttttttttgacatggagtcttgctctgttgcccaggctggagcacagtcttggctcactgcaacctccgcctcccgggttcaagcaattcttctgcctcagcctcctgagtagttgggactacaggtgcacgccaccatgcccggctaatttttgtatttttagtagagagggggtttcaccatattggccaggctggtctcaaactcctgacctcaggtgacccacccaccttggcctcccaaagtgctgggattacaggcgtgagccaccgcgcttggctgggactaatgttttgataagaagaggaagcgacaccagagctcgctgtctgtcaggtgaacacatggcaagaaggcagccgtctgcaagccaggaagtgagtcctcagtgtggtctgaccatgctggcactctgatctcagactcccagcctctagcactgtgaagaaataagtgtttattgcttcagccacctaatctgtgattttttttgtaagctggagctaagataactggaaagacagttttcttttctggggaaaaatcagttgaaactttaattcccagtgtgacagcgtttgatgtggggcctttggaggatgattaggtcatgagggcatcctccttaataggattagcgtccttataagaggagacaccagggggctcacttactctctgctctctctgtcctctctgcgtgtgaggacacagggagaaggcggccatctgtaaaccaggaagagagccctcaccagacagaatcagccaacagtgatcccagatttcacattatggggacactattcaactcactatgctccccttctacagggctccatcagtgaaggagctgcccagggtctcccaggctcagaggttcatgctggctcgtgggcccagggtcgttagagatggtgatctcaagctattgcaggttaccctgtctgctttgcacattttcagtggaaagcagggatctgtttttatatgagcccaggaagtcactgttttttagaaagccataacagaagccatacatatagttacttctagtggggctgtgatgctgaaggatttataccaattgcctggtgtacactggacctgcacgctggcgagaaactcaccactgacttctgatgctttagttctaacagaatgggaagacagatggacaaatgacctcctggtgctgagagagggaaggaggcagctgcctgtggatccactgtgctggggctagccccagaggagggggctcacactgctgggaggtcctttccaggctgtgtggctgcaggtaagtggctacctgctctgaggctctgcctggttttctctctctaaacagggctccagcctccccttctcccgagggacatggcaggtctctcagcaagcttggcctcatgttatgtgtgggctcagcccctcacacacaggcattccctgaaccaactagtaggctgtgtgcatacagcagagagtgctcggcctttggctcctccgggtacactcctgctgctgctggacaggctacgtctgaagcttgtcctccccacttcctgtgtgagatcctaaccctttgtggtggtgctaggaggtggggcctctgggaggtgatgatgacatgaggctggagccctcaggcgttggattcctgcccttataaaagaggacccagaaggctcccttgccccttcctccaaatgaagacacaacaagagggcccggtctatgaactaggaagcagccctcaccagacaccaaacctgccggcaccttgaccttggacttccagcccctagaactgtgtggaaataaatgctgtttctttctttctttctttttttgtttttttgtttgtttgttttgttttgtttttgagataagagtttcgctcttggtgcccaggctggagtgcagtggcacaatgttggctcactgcaaccttcaccttccgggttcaagcgattctcctgcctcagcctcctgcatagctgggattacaggcatgcgctaccatgttcagctaattttttgtatttagtagagatgaggtttcaccatattagtcaggctggtctcaaactcctgtcctcagatgatccacccaccttggcctcccaaagtgctgggattacaggcatgtgccactgtgcccggccaataaatgctgtttctaagccaccagagtatggcattccgtcacaccccaaaggacctaaaatagggctttttttttttttttttttgagacagggtcttgctctgttgctcaggctggagtgcagtgttgcaatcatagctcgctgcagcctgggaatcctggctcaagtgatcctctcacctcagcctcccaaagggcttggatcacaggcaggcaccaccaaccacacctggtcaagacagggcttttgtgtgggctattctttctgcctgacatgctcttcccgcagcgtgtgcctcagcaagaggacaagaggagaccctgagggagtgatgatgtttgtgttcagggtggagaacacagcaagtgcaaaggtcccagggcaggatggtgacaagggtggcagaggaaaggtaaagggggtggggctggacagagcaactgaggtgcaaggcaggggagatgcggtagagtggggtgggggtcagctcacacaggaagtcacgtgtgctggtaagaacttgctggtgggggccaggctgggtcggctcaggtgccacgtccaccggcatccccggagtgtgcaggggtacccacctcgtgtgtagggggagggcaggtgggttcacagcggggttgggtaaacctgggtgttgtgcacacacaaaggagcccaaggggagacacaggcttgcttgggggcagtagaagaaagctgtctactcccagcacttctgacacgtgggctttctccacaccaacaaccaagtctccaatctgctctgactgggaggcacaggcagctaccaaccataaaactgcctcaacccctccttgggtttggtgatttgctcacatagctcattgaactcagggacatgctttatttacggttactggtttccaataaaggatacaactcaggaacagccagatggaagacacacagggtaaggtataaggaggagctcagagcaccatgccctctctgggtgctcgacagccccagagctcggcaaaccctaagtttagggtggttatgggggttccatgacacgggcgtgactgacataggtgtgatgacactggccatcggtgatgaactcaacttccagccctctcccctcccaggaggtaggggctggctgaaggctggaatgctcatcagggctagctcccgtggcaaccagcccatcctaggggcctatcaggagtcctccattagcataaatgtacttgggggtctaccaggagtcctccattagcataaatgtacttgggggcctatcaggagtcctccattagcataaatgtacttgggggcctaccaggagtcctccattagcataaatgtacttgggggcctatcaggagtcctccattagcataaatgtacttgggggcctatcaggagtcctccattagcataaatgtacttgggggtctaccaggagtcctccattagcataaatgtacttgggggcctatcaggagtcctccattagcataaatgtacttgggggcctatcaggagtcctccattagcataaatgtacttgggggcctaccaggagtcctccattagcataaatgtacttgggggcctatcaggagtcctccattagcataaatgtacttgggggcctatcaggagtcctccattagcataaatgtacttgggggcctatcaggagtcctccattagcataaatgtacttgggggcctaccaggagtcctccattagcataaatgtacttgggggcctatcaggagtcctccattagcataaatgtacttgggggcctatcaggagtcctccattagcataaatgtacttgggggcctatcaggagtcctccattagcataaacacaggtgtggttgcagggggcttattaagagttgcagaagacactccttctacccctgtcactcaggaaattccaagggttttaggggctctggtaccaggagctggggataaagattaaacatatatttcttattatatcacaagatcacaggaagacacatgcattacatcacactctgacacacacagggtcatacacaatcatacctgcccagacacacacagacatgcagagacacccaaacccatatccagggacacacagtcgccctcctaacccccatgcaaggaggcaggtgggaagccatcacctgcagccacactcacacatgcacacagggtcccgggcacacgtagctacacacacacccagccccacacgtagctccctgtgtgaagaggtgcacagagacgcacaaggtcacacatgccacctgctccacacaggccggccattactgggacacacccacaggggatggctggacacatgtgcagtcacactcggtggatagagctccagcatagccaaagcccacatgtgcagcgtctccatcatgtgcagatgcacacacttcagacagcacggcactctacaggctcgcacagccaggtcacccatcattgtgctggcaggcacacgggccgagccagcctacacggcggcacacccagacatgcacacgtggggtcacacacctcacatccaggagaactttcagacttgcccaaaggcagccacacgtgtatgtgacatgctgtgatatgcagacaccgcttcacatgaacgagcacataacacaccgataaagtgttacatgcctttacctgcagtcacctgcctgggctggcaccactgagtgagcaggtgcagacacagtgacactcggggacgggctcacaggcagtcacacacctgcaaggcctggcaccgccgagtgagcaggtacagacacagtgatgggctggcaccgccaagtgagcaggggcagacgctgtgacactcagggacgggctcacaggcagtcacacacctgcacctgctggtaccgtcgagtgagcaggtgcagacgctgtgacactcagggacaggctcacagccagtcacacacctgcacggcctggcaccgccaagtgagcaggtacagacacagtgacgggctggcaccgccgagtaagcaggtgcagatgcagtgacaggctcacaggcagtcacacacctgcacctgctggtaccgtcgagtgaccaggtgcagacgctgtgttactcagggacgggctcacaggcagtcacacacctatacgggctgacaccgctaagtgaacaggtgcagacacaatggcactcggggacgggctcacacgcggtcacacacctgcaggaacacgcgcacactacacaccgttgctctcgcctcccggtatcaccttcgaacgcgctggccggccccctcctagcctggtgcagtcggctccgcttctactcagtctcgggtcctcctgggccaacgcagaccctggtgcctccttccttagacgagctaaggtcaagacttctgctgctgcggaggagcccgcgcaccaggccggggtggactgcgcctgcgcatcgggcccgcctggttcttaggaactacgactcccagggggcgctgcgcgctcgccggcaccgcgactaaagcttgcaaagcctgggtcatcgaaactacaactcccagaaggctaagcgtctgcacacgctaggtccgcagggcgctgacccctgggggcccgaggagcgccgggctgctgccccgagccccgcccactacagcctcagtgcatggcggtgggcgcttccagtaactcaggggtgggacttttttcttgctcaggggatgaggccgagcccacaggcttagaaagaaggaacttgagtccgggcacctgtcatcccagcgcttagggaggccgaggcgggtggatcacctgaggtcaggagttcgagaccagcctggccaatatggcgaaacccccgtctctactaaaaatacaaaaattagccgagcatggtggcatgcacttccagctacttggaaggctgaggcgggagaatggcttgaacctgggaggcgagggttgcagtgagctgagatcgcaccactgcactccagcctgggtgacagagcgagacttcgtctcaaaaaaaaagaagaagaaagaaggaagctgaggttcagacaggctaagtccctactgcaggctgcggaatctaaaaaggtaggtgccagggtttgcaacccacacttttattttggtctcaggtagctgatgtcattccagtctatggcaaagaaggtggcaaatccattaacatagatgaagaatttcattttactttttagttttatttatttatttatttttattatgtatcatgcttttaatacaaactttaaaaaatctggaacaatagaaactgtacagatttgatcaatctttttgttttgtttttaaactaaaatctctaaacacaccaatgtcctattccaaaatattgcacaacattctgaatacaaaacccttgattgtattcctccttcactgaagaaaaaacttcatgaccctgctccccgggctcctctccaggcttgcgtcaatgcccccttcccatccctagggagaaaactagagaatctataactcactgcattgagaaaaagacatcattctggactaacagtttccattcttcagaagataatccaccttttgatttgttcctgggaaacagggatagatagaggatggggaaaggggagaaaaggttttatttctcctcttttttttttaaagtttgtttttcctgaaaaaatatgtttctctcatctttttaagaaaaaatcttgaaaagaaaaaaattgtttttacgttagaaatatacatatattatatatacctcttacattttacaaatgtagcaaattattcaatacaaacggacaccaaaaaatgtaaaaaataaaaaaaagttttcctaagaaccaggtaaattagtgcagatttctgtttttgttttcttaaaaaaaataaaattgaagcaaaagtgcctagatttgagacaagacagactgaactgggcccaagagcccagcactggagtcatgctcctgaacacacatttttcttcgtatttcaaaagacacaaaggggttggtctccccccctctccctacatgtgagaaacaagcagacctggtgtgggtgggtgcctgtgtgtgtggatgggaggagggatagaaggggatgtaaggcagcatccaacctttcccagagagaagctatctgctgggcctgtcacctgtgtgggagccgaggatgagggaaagggtggcccagactgggctggcccctgagaagtctaggggaacagatggtgctgggctgagaagccaggacattgcctgccgggggaggtagagctggtgcctactgcagggagaggaggctggcagtgccggcctgggctggacccactgccatagcagttgcctacttggggtccctgggtaggatggagtgggtggggtgccaggggctttggtgctttctggtgatgggaccctgatgccaagtgcccactttgcaaagatgaaaaagttcatgaccctgctcccttggctcctgtccatgcttgcctggcctcctggggttggaggaacaagctctctcctggcagaggcaggagagagttttattttttagaaacagtttcgctttgttgcacaggctggagtgcagtggtacaatcacggctcactgcatcctcgacctccccaactctagtgatcctcccatcttagcctcctgagtagctgagattgcaggcatgtgccaccacactggctaacttttttttaacttttattttttgtagagatgaggtgtcgctatgttgccctggctagtcttgaactccaatccttccacctcggccttaaataattttaatagttgacatgcacatggcatttactattggccggcattattttaaggtgcctgctctgaaggaattctgttagccttcctaaattattcccttggccattggaaacataggcatgagatcatttttagataattggaaaagcagagaaatctgtgaagatagaatgggaaaaaaaatgcatttcactaaaccaacatgccattgattgtgagattccacattactttatgtagccccacggctgcccttaaaccatgacacatgctttatttacagttcatattttacttattcgtagacctcaagaggcattctgtgcttccctcttccttctggaagcttcatgagaagggacattttcctcaaaggatggacaacagaaacaactcaaatattcatttcctttaaatatggtttttaagacaattttctttagaaagccacatttacctgttgggggttgatttatgctcacccccctcccaaatatatgttggaatgctaaccccctattcctcagaatgtgactttatttggagacaggttctttacagaggtaataaagttaaaatgagtaaatagggtgggccataacccaaaatgacagctgtccttataaaaagggtgcatttgcacgcagagacacgcatagagagaacatgatatgtagaggcacagggagaaggccgccatctgcaaaccagggagagaggcctggagcaaattcttcttcatggctcttagaaggaaccatccctgcctacaccctgatttcagatttccagcctccagaagcgtgaggcgataaatgtctgttgctgcagccacaggttggcggtgctttgctgcagtagccttagcacctgatagatggtctctttacatgtcaagcacattgcagcgcacatttgacacacagggagatggaagctcctggaggataagtgttttgtctgtgattttgaaggttgcaagtggaggaactgggattcgaacccctctctgtgtgatgcctatgcctcctctgtgttaacatttatttttacttatttttattttttagtttttgtagagatgagggtctcactatattgcccaggctggtcttgaactcctgggcccaaacgatcctcctgccttggcctcctggtcttgggattacaagcataagccactgtgccaggcctacactttaaagcactttgcctctttaaagcactttgcctctttcatttcctagcctggagaaaatgtacttctgtggtcactaagaaaacaccttcacaatcaggcaaaaatgtccccagaaaatgctggcttgggctgctgaggaaatgcacaatcaaatcaggccacacaacgtttcagagaccctgaggcagggactccatgtcccagctatgtttgtcacacaccagtaggcagcctctacccaggggtggaagattctagacccagctataggctctggcaaccagggcaggcagctccttccaggaaccggtttctgtggttttctttggtcacttccattaagtcttaaacaccccctggaagaaaatgaaagtgtgacgttgaggaacgtgagatcagatggtggagtagttttctagagccaccataacaaagcatcacagaccagggtcttaaacaatggaaacttatttcttcacagttctcaagaatggaagttcacgatcaagttatggccaaggttggtttcccctgatgcctctctccttggctggcagacgaccatcttccccatgtcttcatatggtcttccctctgtgtgtgtctgtgtcctaatctctcccacactcttttttttttttttttttttttttttaagaatgtcagccatgggccgggtgtggtggcccacacttgtaatcccagcatcttaggaggctgaggcgggtggatcacctgaggtcaggagttccagaccagcctggtcaacatggcgaaacaccatctctactaaaaaaaatagaaaaattagccaggcgtggtggcaaatgcctgtagttccagctactcaggaggctgaggcagcagaatagcttgaacccgggaggtggaggttgcagtgagtggagatcacgccactgcactccagcctgggcgagagactgagactccatctcaaacaaaaaacaaacaaacaaacaaaacaaaaaacaatgtcagtcatattggacttgggacccatgctaatgacctcattttatcttaattccctttctccatctccaagtacagtcacattccaaggaatggggggttaggacgtcaacataaaatttggtggtggggcacaatttggctcatcacaatgggtaaaatggggcattaagctcacatcctgaatctaaaacccacaagaggctggagtactttgctttccctggttcatgatcaccgtgctaactggagtgtggtcaccttgaaattggcttagaggaagatttatgatatcctcccaagtcaagggctcaggctctaaacaccggcttaaataagagctgagtgaaagtccacaaatcttgttacatcaacttctgctggactttgttggacagatgctgaagtcctctgtggagaaacaccttagcaacttgtcaaagtagttcatttctagagatctcatgaccaatgagcaattattccagattccctgtgggttgaaatattctgaattttatgctgcattatcattataactgggtgatctctggcttagcatcacgtttgtgacctcctggcttctaaatgtttagtgcccacctggcctctaccaccaaaagatcctattattcccaccaagctcatggaatccaatttcctcgtggcattttctccatcctacaatggacagcagccacagggctcttcaccgatccagaagcctcttcaccttacagtgttggtgaggcaagtctcccatgggtcctctgggagtatgtttaagggtacctgggcagtttgcctgcatagaccgatgtctacattcacgtttccttaagcttccagactcccccctttaccgtgtactaggaaatggctgggattttgacctcaggggggttgccagtccattccagctgctatcacaagacagcataaacagggcagcttataacgagcagaacaggtgatgtatttatttatttaaacagagatgaggtctccctgtgttgcccattctggtcgcaaactcctgggctcaagtggtcctctttcctcggcatcccaaagcgctgggattacaggcatgagccactgtgcctggccttgaaaagaatcattctgaaggctagaaagcctaagatgaaagtgccaggagattcggtgtctggtgaggacccaattccttgttcgtagatggcaccttcttgctggctgtgtcctcacagggtggaagggagaaaagagctttcttgggcctcttagaattatgctaatcccattcatgagggctcagccttcgtaaccaaatcacctcctcaaaacctcacctcccaacaccatcaccttggtgattaactttcaacataaaagtttttggggggtgacacacacattcaggcctacagaggtggagtgatctgcagatgactgttgattcaggcgtcaccgctccaacactggagactctttttttttttttttttttttgagacagattctcgctgtctggagtacagtggcacgatctcagctcactgcaacctccacctcaagcagttctcctgcctcagcctcctgcgtagctgggactacaggtgtgtgctaccgcgcccggctaatttttgtatttttagtagagacagggtttcgccctgttggccaggctggtctcaaactcttgacctcaggtgatccaccctgctcagcctcccaaagtgctgggattacaggcctgagccactgcgtccggccctggtcccttgatctaggatttcagcctccagaactgggagagaataagtttctgttgtttaggtgaccgagtctgtggcactttgttatggcagcccaagctctctgatatagaggctaagcaactgccatgcttcatttacttaatcagctgtgggtcggcactgtgggttgggtttagtcaactagttcttctgtcttggctgggcccactcgttcatctgtgctgagctgggttgagcggcggctggcccatctgtagcctctcatcctctgccaggacagcctagggtcatttccatggcagcctggcagggttccgagagagttagtaggaaccgtcaagcccgttgagcacaaggctctgtactgacagctttgcacttccactgcaagctactggccaaagcaaaccacaggtgcagcccagatttgagggatgggaaaatggccacaggacaaacggcatgggttcaaggaggggtggaatactaggatgagttttgcaatctgtcatgtgcacatacacacatgtggtgagttggatacagcctggtgtgtgtaattacaaacacccctctaataaaaatgtgcaaagatctttcaattactcaagtgatgttatttccaaacctttcctatcagactcaaccccctttagatacgattattctcatgctggctgggcgtggtggctcacacgtgtaatcccagcactttgggaggctgaggtgggcagatcgcctgaggtcaggagtttgagaccagcctgatcaacatggagaaaccctgtctctactaaaaatacaaaattagctgggcatggtggctcatgcctgtaatcccagctactcaggaggctgaggcaggagaattgcttgaacccgggaggcggaggttgcagtgagccaagatggtgccactgcgctccagcctgggcaacaagagcgaaactccgtctcaaaacaacaacaaaaattatcctcatgctaaaatgtattcccaactatgacttgaatttctctatttattggtaaaagaaaaattcggccaagcgcggtggctcacacctgtaatcccagcaccctgggaggtcgaggcgagaggatcatgaggtcaggagatcgagaccatcctggctaacgtggtgaaaccctgtctctactaaaaatacaaaaaattagctgggcgtggtggcagccgcctgtagtcccagctgctggggaggctgaggcaggagaatggcgtgaacctgggaggcggagcttgcagtgagccgagattgcgccactgcactccagcctgggtgacagagcaagactccgtctcaaaaaaaaaaaaaaaaaagaaaggaaaagaaaagaaaaaaaaggaaaaattcagaggtggcatgtgcaaaacttgcaccatacatttatatagctgatactcaattgaagaacatgtatgtgattttcagattcttgctgtgataaatgatgtttctgtgaacatggtttttaccagtttttaaaaatgggtgatataataaatagaatgtgaagctgtatcagtcagggttcagaaacagaatcaataggagatactatgtacctatccacatatatattatagatgtatatattaatagacacaaattgatcacgtgagccaattccttaaaatctttctcttatctctctctgtgttgtctatatgtatacatatataatagagattctggtggaaggctctgagatcaagggggaagggaggcaggccatgaaaaagtcactccaagacagattggggtcctcagctctgcagacccaggaaattcagatatatgtgtgtatatatacctgtccctatctatctatctatctatctatctatctatctatctatctatctatctatctatctatctatctatccatctgtctatctatctgcctgcctgcctgcctgcctgcctgtctgtctgtctgtctgtctatcatctaatgtatgcagaggttgagatttattttaaggaattgtctcacacagttgtgggagttggtttgtagggccagccagcaggtgggaaactcaagcagacattgatgctgaaatcttgaggcaggatttcctcttctctgggaaaccctgagttttactcagaaggccttcaactgattggatgaagtccacttacattaccgagggcaaccttttcttaaaaaaaactggttgtagatgataaccacatctacaaaataaccttcacagccatgcctggattagcatgtgattggattaccaggcactggaccccaaccaggttggcccataaaactcaccgttagcaggagtgttgtggggagtgggcaggaaggggtatgtagaaagaaatgactgaggaagactgatgagataaatattggttctaagtacaattaggaaagatcaccaagtcctactttaccaaaaaaaaaaaaaaaaagaaagaagaaagtaggccaaatgtaaaccatgatacatgttattttgttatttattcatttttttttgagacggagtctcgctctgtcgcccaggctggagtgcagtggcgcgatctcggctcactgcaacctccacctcccgggttcacgccattctcctgcctcagcctcccaagtagctgggactacaggcgcccaccaccatgcccggctaattttgtctttgtatttttagtagagacggggtttcaccgtgttagtcaggatggtctcgatctcctgacctcgtgatctgcccgccttggcctcccaaagtgttgggattacaggcgtgcaccaccgcacccagcccactgctttccatttttaaggtctttatctagaattagaattgctggatcacatgacaattttatttttaattttttttggaaaccttcagaccattttccagaatgactgcatcataccacattcccatcagcagtgcagaagggttccaatttctccaaatcctgccaatatttcttacattgtgttttatggatagtagccatgttaatgaaagtgaggtggtttcttattgcaaagatgatgatcttttaaattttttcagtcgtaattgcttaataatagaatgtgtggctggacacggtggctcatgtctgtaatcccagcactttgggaggcccaggcgggcatatcatgaggtcaggagatcgagaccatcctggctagtacggtgaaaccccgtctctactaaaaatacaaaacaaagaaaaaaaaattagccaggcgtggtggcaggcgcctgtagtcccagctacttgggaggctgaggcaggagaatggtgtaacccgggaggttgagcttgcagtgagccgagatcgtgccactgtacttccagcctggaggacagagcgagactctgtctcaaaataaataaataaataaataaataaataaataataataataatagaatgtgtgtgcctgctgggcattctataccttctcaaacattggcatcagactggactatgccacccgcacttcctcatccttgttgattttcgtgggtttgattcacagcaaacactgccaacccagcatcacaaagcatgatgttatcaaaggaagtgtagagagatcttaggctgaaactgtggaaccctggaggtggaggttcatgtgtgtcagatgtctaatactgctacgcgtccctaaaattgaaagaatcagggtacctgggctgacagttgcagctgtggggatagagaggcagaaaagcaggaggtgttcattggagggggagagaacggaagagctcccctggtcgcctagcaacgcggagacgccccacaggggactctggtgagaacaggcagtggcagaggggctattctgcctcagccaaatgtagctgcagagactcaggaaagtaatgtagatgtagaaattagaaattaattaatttctttaattaataaccctcagttgtatattgagacggtctccactgattttttcatgtctaccgtttgcatagttttaggccagtaggtcccaaaatgtagtttaaggactcctgggggaatcaagaccctttctgggggtccataattcccaacattttcctaagaaaattaagaatttacttgcctaccgacttttcaatttatctgcatgatgtaatactgcaaatgtttaagtggcagatttgagaatctagctgtcttgtactaaggcgaacattaaagaaatttgcaaaaaaggccgggtgcagtggctcacgcctgtagtcccagcactttgggaggccgaggtgggcggatcacaaggtcaggagtttgagaccagcttggccaatatggtgaaaccccgtctctactaaaaatacaaaaattagctgggtgtggtggcgggcactcgtagtcccagctactcaggaggctgaggcaggagaatcgcttgaacccggcaggctgaggttgcagtgagctgagatcgcgccactgcactccagcctggcgacagagcgagacgccgtctcaaaaaaacaaaacacaacaaacaaaaaaacccaaaccctcagttgtatattcccaaacccatcctcagtggagacggtctccactgattttttcatgtctactgtttgcatatttttaggccagtagttcccaaaatgtagtttaaggactcctgagggaatcaagacctttttgggggtccataattcccagcattttcctaagaaaattaagaatttacttgcctaccgacttttcaatttacctgcatgatgtaatactgcaaatgtttgaattaagtggcagattggagaacctagctgtcttgtagtaaggtgaacattaaagaaatttgcaaacatgtaagacaatgctaattttcttactaattctttggaaaatactgtataattgcctataaaaattgtgaaatgttaatatataataagattattatttttaagttttaagtgtataattttctcagcttcaatatgtaattgtatgtaaatatagatcatacaaagaaaaaattttaggggttctcaatatatttaaaaaatataaaattggcctgagatgaaaaactttaagaattactttcttaggttaagtttttagatatcagctggctgggtggaaggaatgtgcatactcggtgcttttcatacacggtgtcaaattcccatgaagctatccagttgttccgtggctctaaattctcatgggaaatgtaacccagatctgtctcgctgttatcaatttttcacgctgcctaccataattaacccagtgaagaatttcagtgaaaggtagattgagctatttgtacccagccttccagagaattccctttatataggataagtttaaattctttttggggggccggcgggggtgggggtggtggtgtctggaaaggaggatcataggataagtttaacattcttagatgagaaagtcaaatgtagattcctgagttcacaaaccccagccccaacattcatgatgtgggtgatcctggggaagacatctgtccttctgagcccacctccttcacttagaaatgggcactgggggtggggaaggattggacctggtgccccccaagacattgtaagaatcaagaaatagtagctaggtgggggtttttgggcatttctaccataaatatgaaatataattttattttaataatgtgacaaataagataaagagtcatcttcttatttattattattattattttttgagatggagtcttgctcttgttgcccaggctggagtacagtggctcgatctcggctcactgcaacctctgcctcccaagttcaagcaattctcctgcctcagcttccccagtagctgggattacaggcgcccaccaccaaacctggctatttttttgtatttttagtaaagacggggtttcgccatgttggccaggctggtcttgaactcctgacctcaggtgatctacacgcctcggcctcccaaagtgctgggattacaggtgtgagccaccttgcctggccgagaatcatcttctttgtgaatttttccccaaccactgtatcgataatcgttaaaacaaattcctcctcaatgctgtcataagaggtatgctggttctcttgttccccatccctcatggggatataactgactgtttacctgtttcccccaccaggtcatgaactctgagagtttgagatgagcctctaaaagctgtatcaatagcaccttgcactgttgaagcaggtaagtgttttccttgttacttcttaagttcagttggaaacccaacatagcaaatcctctagaatgcagctgaagcagtactaaggctgggtgtggtggctcatgcctataatcctgtagggaggcaaaagcgggaggattgctggagcccaggagttcaagaccagcctgggcaacacggcaagacctggttctccacaaaaaggaaaaaaaaatgctaagaggcaagtatatagcaataaactcctacatcaaaaaagtagaaacatttcaaataagagattgggggcagtggctcatgcctgtaatcctagcacttttggaggccgaggtgggtagattgcttgagaccaggagttcgagaccagcatgggcaacatagcgagaccctgtctctacaaaaaatcagaaaattagccaggcgtggtggtgcaagcctgtagccccagctactcgggaggctagggtgggaggattgattgagcctttgaggtagaggttgcagtgagctgagattgtgccattgcattccagcctgggtgacagagctagaccctgtctcaaaaaaagaaagagagaaagaaagagaaataaataaagagagaaagaaagaaaagaaagaaaacaaacaaggaaggaagaaagaaaaagaaagagaaagaaagaaagaaaaagaaaaagaaagaaagaaagacttcaataacctaaggatgcacctcaagaatctaggaaagcgagaacaaaccaaacccaaaaattagtagaagaaagtaaataaagcgcagagcagaaacaaataagattgagaccaaaaaaatacataaaagatcaatgaaaaaaaaattgcttttacatcatggtcttgaccttgcagggatggcccctcccagttttagccaatttctcgagtgataaataacttgcttgagagcatgccttttatatataaaccaccaatccagagcccacatcccacccactctctaacagggcgctatactcaccccagggccaggtatcacaccactaagaacagcccttttccccagatcccactgaggttatccaaagtgaccagccctaacctatgaaatctgcctcacttcttcctttccacagaaactatagcaaagtcttgtccacacccacatttcactcacctccttctgactcctggcagatcctggcgctttccccatggggctgcctgagctgagacgggctctcttctcctggaaactgagtaacacaatttatttcaatgacagtcacttcctcatctgttggcctcagcgtacctccaattttccattacacaataaatggaaaataatataggccgggtgtggtggctcacgcctgtaatcccagcactttgggaggccgaggtgggtggatcacctgaggtcaggagtttgagaccagcctgaccagcatggcgaaaccccatctctactaaaaatagaaaaattagctgagcttcgtggctggagcctgtagtcccagatacttgggaggctgagccaggagaattgcttgaactcagaaggcagaggttgcagtgagccgagatcatgccgctgcactctagcctgggagacagagcgagactccatctcagaaaaaaaaaaaaaaaagaaaattgaattgggccagcccctccacacctgtgggtatttctcatcaggtgggacgagagactgagaaaagaaatgacacagagacgaagtatagagaaagaacagtgggcccaggggaccagcgctcagcatacagaggacccgcactggcgccagcccctgagttccctcagtatttattgatcattatttttactatcttaacaaggggagcgtagaaggacaacaggtggggagaaggtcagcagggaaacgtgcgcaaaggaatctgtatcatgaataagttcaaggaaaggtaccgtggctggatgtgcacgtagactagatttatgtttctctttacccaaacatctcagtgtagcaaagagtcacagagcagtattgctgccagcatatctcacctccagccacagggcggttttctcctatctcagaatagaacgaatgggaatgatcggctttacacccagatattccattcccagggacgagcaggagacagaagccttcctcttatctcaactgcaaagaggcctccctctttcactcctcctcctcagcacagaccctttaagggtgtcccgctgggggatataaggtctttcctttcccatgaggccatatctcaggctatctcagtgaggggaaaccttggacaatacccaggctttcttgggcagaggtccgtgtggctttccgcagtgcattgtgtccctggttaatcgagactggagaatggcgatgacttttaccaagcatactgcctgcaaacatattgttaacaaggcacatgctgtacagccctaaatccattaaaccttgattcaatacagcacatgtttctgtgagcacagggttggggctaaagttacaggttaacagcatctcaaagtagaaaccattttttttggtacagatcaaaatggagtttcttatgtcttccttttctacatagacacagtaacaatctgatctctctttcttttccctacagaaaataatatggagatgacagtgtcttgtacaactgtgtgatggcttgtctccccatgtctgtgtgattgtgtgtccttgagtgtgttggatggagtgtccttctgtgtgtgtgtgtctgtgtttctctctgactctgtgcggttgagggcgtgtggtctctcacgtatgattggatgtgactgcggatctccatgtgtgattatgagtcacgcttcaccggaaagtttctatctcagcctggatgagccacaggaatgtgtgtgttcaggtttgctgtgtgtctgtgtctgtttgacctgggctgttgtgtgtgcatcttagtctgctgtgttacatcatgtgccgttgtgtgtgactctctctaggacagcccgagtgtgactgtgatcatagaggggatgaagccccctgtgtgtgggtttgtgactgtgagtgtgtgctccagttaggagggttttgagcgctcatgtgagtgtgtgggaagattgtggattaatttgctatggctgctgtaacaaaacaccacagactgggtggcctgggtagactgggtggcttaacctaatactaatagaagcttattttctccctgtcctggagcctggagcccaagatcaaggtgtcgaaggagcctgtgttcaggaggcctctctccttggcttcttggcggccgtattctcttggcgtccacactaggtctttttttttgtatgcatccctggtgtcactgtgtgtgtctaactccctcctctataaggatgccagtcaaatgggagtagggccagtccaaaagcctcatttaatcccctcttaaaggccttgaccccagatagtcacatcctgaggttctggagtttagggaatcaccaaataagttttcaggagaaagcagtgagcccataacagtgtgtttgtgtgtggatgtgtggtcatgggagatgctgtgaaggttgccattgtgtccacatgactgtgcgtgaaacagtgattcatgcaattatgaaacccatgttgtgtgagttccacaagaccaaggcaccttttatccactaaatgtgcacatgtctgtgtgtgtgtgtgagtcccacaaaactcaggcatctttcatccactacctgtgcatgtgtgtgtgtgtgtgtgtgtgtgtgtcccacaagacccagacacctttcatccactacatgtgcatgtgtgtgtgtgtgagtcccacaagacccaggcacctttcatccactaaatgtgcatgtgtgtgtgtgtgtatgtgtgagtcccacaaaactcaggcacctttcatccactaaatgtgcgtgtgtgtgtgtgtgtgtgagtcccacaaaacccagacacctttcatccactaaatgtgtatgtgtgtgtgtttgtgtgtgtgtgtatgagttccacaagacccaggcacctttcatccactaaatgtgcatgtgtgtgtgtgtatgagttccacaagacccaggcacctttcatccactaaatgtgcatgtgtgtgtgtgtgtatgagttccacaagacccagacacctttcattgtgtgtgtgtgtgtgtgtgtgtgtgtgtgtgtgtgtgtgattgaaggagatactatttgtggataaataaattgaaacctcaggccactttcctgtcttatatcaaccttattagaatcctgcccaccccaaatgcgcaattccataggtagagcaagataggtcctaggatccatctgggaagtgcccaggatgcccttcctaggatgcttggagacaggattggagcaggtgatggaagcatgggctcagggccaggcagtctggagacctctcctctctgagcccagtgttgcctgtaaaatgcagacactcctaggacctcactcacagccaggggtgcgggagatggccgtgcatattgtactgtgcacttcggctcctgttcaaaaggatacgtgggatgtgaaacccagcctgcgctctctccacagctgtgtccatgccagggccagaattcccactggagtatgacattggtccatccaaagtcccagagcctaccatggccatgtgcaccgttgtcacttggggaaaaaatcttcttaaacagataaacaaacatgtgcaaatgcatatattttagagtatcatcttgtttttaagcctgggcaacatggtgagaccccttctctacaaaaaacaattagctcggcgtggtggtacaagcctgtattcccaactactcggggactgaggtgggaggatcgcttgagcctgggaggtcgaggctgcagtgagctgaggtcgtgccactgaacagagtgagaccctgtgtaaaaagaagaaacaggacaaaacaaaaaccaaaaaccaaatcttaacttttgtccgctaatttgaaggaacgcgtatgaaatcacgttgctgtcactagatggcacttttgcaccatgaaaaaaataggctctaattattatttttttttttacttttcaattttcaattgtggcaaaatacatattacacagaatttaccatcttaagcattttgtgactaatatgtgaaagatatattactaatatcataagcctgtgatatatgccttttttatttttttaaactatggtatttatcattttaaatatagtcatgaatcgacaacagggatacattctgagaattttgtggttaggcaattttgacattgtgtgaacatcttagagtgaacttacaaacacctagacggtgcagcctactacacacctaggctctgtggtatagtctgctgctcctaggacacaaacctgcgtggcacgttgctgtactaaatactgtaggtacctggaacacagtggtatttgtgtatctaaacatagaaaaggtacagtacaaatttggtactatgatcttatgggaccgctataatatatgagacctatcattgactgaaatgttactatgcacctcgtgactgtatttttttttttttttttgagatggagtcttgctctgtcacccaggctggagtgcagtggtgccatatcagctcactgcaagctccgcctcctgggttctcaccattcttctgcctcagcctcccgagtagctgggactacaggcgcccaccaccacgcccggctaattttttgtattttggtagagacggggtttcaccatgttggccaggatggtctcgagctcttgactttgtgatccaccctcctcggcctcccaaagtgctgggattacaggcgtgagccaccacgcccggccatgactgtattttgagtgtgcatcactattaagtacattcacttgttctgccacaatctgcaccattcctcttcagagcacctttcttcttggaaaacaagaactctgtgcctattaagcaataactctccatttctcctccttccagcctctggaaaccaccctttttatttttcattcaggaattctgactcttctaagtaccttgtatacctggaatcatacagtattttgtccggttgtgatgggcttatttcaatgaacattgttcctcaaagttcatccaagtcatagcatgggtcagaatttcctttctttttaggcccgaataatatgccattgtctgtatagaccccatcttgcttatccattcaccaatcgatggagacttgagttgcttccactttgactattatgaataatgctgccatgcacgcggttgcacaaacgtctctttgattctctgctttcaaaacttgtgagtaagattcagaggtaaattgctggttcatgggtaattttatttctgttttttcagaacagtcggatggtttcccaccacagctgcatcacatcacgatcgcaccaacggtgcaggtgtttcagcctctccaaatcctgtcagtgttgttatattctgtttaacggatagtgaccatggaaacggcaatgagttagttccttatttctttgccagggaaaatattgctttcatttttaatacttattacttaatcatggtatatgtctttggttataccgtggcaatggctactgaagagtatcctgacacatggatgggggtcaggtcttgacctctggggtgctttattgttagggctgttgttagagttggcagcagttggatgaataatggaatatgatgaggtggaagttgtaattgattttttttttttggaaacagagtcgttatctgtcacccaggctggagtgcagtggcatgatctcagctcactgcaatctctgcctgccaggttcaagcaattctcctgcctcagcctcccgagtagctgggactacaggcgcccgccaccatgcctgggtaatttttgtacttttagtggagatgtggtttcaccatgtttgccaggctggtctcgaactcctgacttcaggttatccacctgcctcggcctcccaaagtactgggattacaggcgtgagccaccacgcctgcccaactgatttttatattatggtatattatggaaaattgtgtaatttttgagggcgaggaggtaggattattgtgtgaagattctttaggtgaggcagccttgtatagttacagatgctgattggtggtggttgctggtcgatctgtatttgtgagcatttatcttgcaattgagcgtactcaggggaacaggttagataactaaaaatagagttagaagagacaggataaggaaagagaagaagtagagtttaattaggcctttttgggcggatatgaaagtggaggctgaagtttggatttggacaatgttttttggtattgatttctctagtcagattagtctaatagaagagacactaaacattgacttgtgtctagatttgtgtgcggggttgtatggtgtactgtgattggataaaaacctagtataggccgggtgtggtggctcatgcctgtaatcccagcactttgggaggccgaggagggtggatcacctgaggtcaggagtttgagaatcagcctgactaacatggagaaaccccatttctactaaaaatacaaaaattagctgcgcgtggtggtgcatgcctataatcccagctacttggggaggctgaggcaggagaatcgcatgaacccaggaggtggaggttgccgtgagccaagattgcgccactgcactccagcctcggtgacagagcgagactctgtctcaaaaacaacaaacaaacaaacaaacaacaacaacaacaacaaaaacctaatatatttgagaacttgaatgtttgtgatgggtattcaagtttaaagtcattggttatgagattaagatctgttgctaccgagaagcccgttgggaattgcacagcttctcaaaccttggacccagattggcccacgccaccctcactcctcatccatgttgatttcagttggttattgctgttcttcacggtgaccactgacactccagcaccacaaagatgtcagcaaaggaaatgtagaaggatctaaggtggagactgtgaacccctggagcctttagttcatgtggtgtcaggagatattgaatattgccgttcttcccttaaatttcaagcatagaggtaactctgcagacacttgcagctgtgaggatggagcagaaggaatgctgtacgtgttcattggagggggagagaatggaggcgctaatctggttgccaggcaatgctcagtgtccttggagatgactcatggtggaattagaatgagaacacgcagtgggggagggactcttctgaaccagcaaaatgcagctgtagagactaataaactgtatggaagtcccacagtcttccaaatggataatctgtcatttgtatattcagataatctccatttatattttcaggtctcttatttgtatatctcccaggccactagttctcaaaatattgttcaaaacctcatggcagaatcaagatcctttcaaaaggcacacaattccaaactattttcctaggaacattaagattttatttgccttttctcttcttagctttttctgcaagatataatgttccaggtgtttgaattcagaagatgattggaggggattaaagggagttgtaaaatgttagacaaggctgggtgtggtggctcatgcctgtaatcccagcactttgggaggctgaggcagacagatcacctgaggtcaggagttcaagaccagcctggtcaacatggtgaaaccacgtctctgcaaaaatacaaagaatacaataatagacaggcatgatggtgggtgcctgtaatcccagctactcgggaggctgaggcaagagagttgcttgaacctgggagatggaggagccgagatggcgccactgcattccagcctgggcgatggagcgagactccctctccaaaaaaaaaaaagaatcccacagccccaccattgacgatgacctgtccatggtgttgaaggacccattggatctatgaactcttacacaggtaagggaggtagttgatgcctactgacttatgcaatggcgacttcaaagtatatttctaaaataaattgaaaccaagattccttgtttgataaccaagaaaagaagaccccaattgggtcgtgttctgcccacatcttcacataaagactgattatgcatttatctcatcactcagcattagggtagtaagtgccatgtgttagcctcctcctgttgggatctgagggccacaaattatcttttcagtgacagctgttttctgattgattgacatcaccttacttcatattttctatgaaggatccatcttttacgtcaatgtggaggtgaaagtttcctgagcgacggtttgatagcccatctccctatgtctctgtgattgtgtgtccttgactgtgttaactgtgtgtccctctgtgagtgtgcgttaccttgtttgtggttgtatttctctatgattctgtgtggttgagaatgtcttgtcttgaatggatgattggatataactatgtgtatgtgtgtgtgtgtgtgtgtgtgtgtgtgtctgtatttgtatttgagttcaaataagcctgcagcacattgtgtgtttgtgtctttctgtgtgaatgtgtctatgtttgatcaggaaatgctggtgattcttcatcttgggtggttgtgttttatcgtctgtcattgtgtgtgactctaagaactgtccacatgtgattgtacttgcatgagggatgaagctccctgtgtgtgagttagtcacggagtttgtgcactggttaggaaagtttgcatcttgagcgtgtgtgaaagtgtatatactaatttgttagggctgccaaaacaaaacgccacatcccgggcagcttgaacaacagacatgtatctacttacctttctggaggctgaattttgagattaagatgtcagcagggctggtttctcttgaggctgcctctgtagattgtgaccaatgctttcttgccatctctaacagtctttcctgtgtgtgtccatctctgatgtctctttgtgtccatattgctgcttctataagaagaaattggattagagcccaccctaaggacctcatttaacttaatcatctctttaaaaaccatatcaccaaatacagccacaatatgaagtactgtgtttgggaagaggaggcagtattcagatcataacagtgtgtttgcgtgtggatgtgtgcatgcttaagaagtggtttgaagaccatttattctgcatggccttgcgtgaaaacatgtgattcatactattacaatctcctgcatataagctaggctagcttagtgtgtgtgtgtgtgtgtgtgtgtgtgtgtgtgtgtctgtgactttattggagttttggagaatacttcagggacatacaaattgggttctatttccactctccctgccttatacctacttcactaggaccctgcacacttcaaaagccccatccagaggttgaggaacagtttcagatctggactctcttctctgggaagtgcccagaatacctctccttagatgctcagagacaagatgggagcaagtgatggaggcatgggtccagggccagacagcctagagacctcccctctctgagcccagcgtcctccactgtaaaatgcagacgctcctaggaccttactcacagccagggctactggggatgatgggatgcctgtgcatattgtagactgcactgaggctctgatccaaggagatgacctggatgtgaactccagcctgtattctctccataaactgtgtccaagccggggcttcaggcttcctaccatagcgtagcattgatctctccaaagccaggaagcctaccatgcccatgtgtgcagttattgtcattttggggaaaaaccttattaaacagaaaagcagacttataaaaacatacccttagccgggcatggtggtatatgcctgtaatcccagctattctggaggctgaggcaggagaattgcttgaacccaggaggcggaggttgtggtgagccaagattgtgccattgcactccagcctgggcaacaagagcgaaactccatctcaaacaaacaaacaaacacaaacaaaaaaatacccattttggcagggcacggtagctcacgcctgtaatcccagcactttgggaggccgaggtgggtggatcacctgaggctgggagttggagaccagcctggccaacatggtgaaaccccctctctactaaaaatacaaagattaacaggcgtggtggcacacgcctgtaatcccaactacttgggagactgaggcaggagaatcgcttgaacccaggaggtggaggttgcagtgagctgagatcgtgaaactgcactccagcctgggtgacagagtgagactctgtctcaaaacaaaaaacagaaaacaaaaaacaaaacaaaaaaatactgtcttaataatatctttttgtttcctcctttcttcccatttgaaggaatgtctgggaaattttcaaatgcctttgcttacgctagatggcaatctggcatcatggtaaaattggcttttatttaacttttttatttttacttttcaatttttaattgtagcaaaatatatattacacaaataagccatcttaagcattttgttactaatatgttaataatatgttacccatagaataagcttattattttaatttttttttatattcttaaaccgtggtaaaatagtacaattgaatattcacctttttacctagagtcaggactcacctaagggcagagatgtgttctgaggattgtgtttttaggtgatattgtcattgtgtgaacatcctagagtgtacttacacaaaccttggtggtagagcctgctgctcctaagctacaagcctgttcaagatgctaccgtgctgaattccatgggggactttaacacaatggtaagcatttgtgtaactgaacatgtctaaacacagaaaagatacagtaaaaatttgctgctaaaatcttatgagaccactgttctgtatataatataatgtcattgaccgaaatgttggtatgtggctcataactgtatgtgtgtgtgtgtatatatatatatatatatatatatatatatatatatatatatatatatatactttttggagacagagtctcgctctatcccccaggctggagtgcagtggtgcgatcttggctcactgcagcctctgcctcctgggttcaagtgattctcatgcctcagcctcccgagtagctgggattacaggcgcgccaccacgcctggctaatttttgtatttttcgtagagatggggtttcgccatgttggccaggctggtctcgaactcctgacctcaggtgatccacctgccttggccacccaaagtgctggcattacagtagtgaggcaccgcactcagcatatatatatatgtgtatatatatgtgtatatatgtgtatatatgtgtgtatatatgtatatatgtgtatatatgtatatatgtgtatatatgtatatatgtatatatgtgtatacatatatgtatatatgtatacatatatgtatatacgtatacatatatgtatatatgtatatacgtatatatgtgtatatatgtatatacgtatatatgtgtatatatgtatatacgtatatatgtgtatatatgtatatacgtatatatgtgtatatatgtatatacgtatatatgtgtatatatgtatatacgtatatatgtgtatatatgtatatacatatatatgtgtgtatatatatatagtttgtttttatttgtttgtttttgagacagagtcttgctcttgtcacccaggctggagtgcagtggtgtgatcttggctcactgcaacctccgcctcccgggttcaagcgattctcctgcctcagcctcccgagtagctggaactacagcataactatatttttaagtgtaaagttcagcaattaagtacatttacttgttgtatcctaatctgtcccatacatcttcagaactcctttagtctgggaaaaccacgactctgtacccattaaggaataactctccacttcccttttccagcccctggcagtcaccattttattttctatttctatgaatttgactcttctaagtacctcgtatacctagaatcatatattatttgtccttttggtgtggatttatttcaattgacagcattcttcaggcttcatccagattgtagcacctgtcaggatttcctttacttttgttcaatttttattttggaatcatgggatacatgtgcaggtttgttgcaaaggcacgctgcctgatgctgaggtttagcatgtgactgaagccatcactcaggtagtaggcatggtgcctgataggtagtttttcaacctgtgtccttcttcctctctcccttggctgtccacagtacctgttgtttccatctttatgtccacgtacgcccaatatttagctcctgcttataagtgagaacatgtggtatttagttttctgttttgaggtaatttgcttaagaaaatggtctccagctgcatccatgttgctgcaaaagacatggtttcattccttttttttttttttgaggtggagtttcgctcttgttgcccaggctgcagtgcaatggcatgatcttggctcactgcaacctccacctcccgggttcaagtgattctcctgcctcagcctcccaagtagctgcgattacaggcgcatgccaccatgccaggctaattttgtatttttagtaagagatggggcttcttcatgttgatcaggctggtcttgaacccctgaccccatgtgatctgcccaccttggcctcccaaagtgctgggattacaggcatgagccaccgtgcctggctggttttattccttttatggctgcatagtattccacagtgtatgtgtgcaacactttctttatccaatccactgttgatgggtacataggttcattccatgtctttgttgttgtgaatagaatggtaatgagcatacaggttcatgtgactgtttagcagaatgattcattttcctttgggcatatacccagcaataggattgctgggttgaatagcagctcaacgcttagttctttgagaaatctccaaactgctctccacagtggctggactaatttacactaatttgcatttccaccagagtatgtaagcgtccccctttctctacagccttgctgatatgttattttttttgactttttaaccaaaacttggttaacgagcaacttgggttgcttccacttttttttttttttttttttttttttttgagatggagtctcgctctgtcgcccaggctggagtgctgtggtgccatctcggctcactgcaagcctgcctcccaggttcatgccattctcctgcctcagcctcccaagtagctgggactacaggcacccgccaccatgcccggctaatttttttgtatttttagtagagacggggtttcaccgtgttagccaggatggtctcgaactcctgacctcatgatccgcccgccttggcctcccaaagtgctgggatgcttccacttttgactctcatgactaatgctgctatgcccatgggtgtacaaatatctctttaattttctgcttccattacttctgggtaatatccagaggtagaaagataattttatttttattcttttcagaactgttgtaattttttttttcacagaatctgcatctcatcacaattgcaccgagagtgcagatgtgccaacttctccaagccctgtgggtggttgttatcttctgtcttatggatagtggccatgaacatgggaatgaagtggttcattatctctttgccaaagaaaaaaatatttctttcacttttcaatagtaattacttaataatgggatgtatttgttggttcctgcacaacttctcaaatgtaggaatcagactagactgtgtcaccctgatgtcctcatcctcattgattttcatgtggttattgtttttttcatagataccactgataacccagcatcacaaagatatgatgactgcaaaaaataaaaataaaaaaatgagagaaccaatgtagaaaacatgaatccctgcagcttatacttaatgacttaatgtggtgacagaagatatgaaatatcaccatacttcccttaaaactaaactgtagggttacctctttagacagatgtggctataaggttataatagcgggaatgcaatgcatgttcatcagatcagggagagaatggagaaggtgacctggttgccgagcaaccctcagtatccttggagatgagtcaccatggaaacagcaataactcttcatttccttttttccagccccgacaaccaccattttattttccattgctatgaatttgactcttctaagtacctcatgtaccaataatcaggtacctaagtacctcatattcctggacagttgtgggggacggcggggaagaagttcctcctcagccaagggagctgtggagactaaggaaagtgattggatgttccacagtttctttcatggacaacctcttgtttactcaaatgatctccacttataatctcctgtatatcatttgtatatctcttagatcactttttcccaaaaatgtagttccaggactccggggggattcaagatttggaatgcacaattccaaataattgtcctaaacacatgaaaagtttatttgcattttccctcattttctctggatgacataatattgcacatgtttgatttaagtggacaatttgatcatagccatctagtggtaaggaaaacattaaagatatttgcagaaatgaaaagcaacaccacctttattgcgaagtttgtttggaaaatgcaagcgtacatttttctgttgtgctttgtttcactgcgcttcacagatactgagtatttttgaatggaaggtttgtgcaagtctgcattggcaagtctgagagtgccattttcctaaagtatgtgctagagagaagtcagtgcctggcttcaaagcttcaaaggacaggccgactctcttcttaggaacgaatgcagctggtaatgttcagttagatccaatgctttttttactattccaaaagtcctaggactctttatttatttatttatttattttgtgaggcagagtcttgctctgttgcccaggctggagtgcagtggcacagtcttgcctcactgcaacctccacctcccgacttcaagtgattttcctgcctcagcctcctgagtagctgggattacaggttgcaccaccatgcccggataagttttgtatttttagtagagacagggttttgccttgttggccgggctggtctcaaactcctgaccgcaagtgattttgctggttttggcctcccaaagtgctgggatcacaggcgtgagccaccatgcgtgggctaaaaattctaggactcttcaggattgtgcaaaacctactctacctgtgctctataaatggaacaaagtcaaaatatcaacatcaataggagtttgaaagaagttgattccaactcctatttgatgactttgtggggttcaagagttcaacggaggaagtcactgcagatgtggtagaaagagcaagaaaactggaattagaattagagcctaaagatctgactggattctgtaatctcataagaaagttttagcagatgagttgaggagttgcttttttttttttttgagagacagagtctcgctctcactctgtcgcccaggctggagtgcagtggcacaatcttgcctcactgcaacctccacctcctgggttcaagcgattctcctgcctcagccttccgagtagctgggactacaggcacgtgtcactatgcctggctatttttttttttttttgtatttttagtagaaacagggtttcactgtgttagccaggatggtctgaatctcctgaccttgtgatccacccgcctcagcctcccaaagtgctgggattacaggaattgcttcttttgaacaagcaaagtaagtggtttcttgagatggaacctactccttgagaagatgctgtgaacattgtagaaatgacaacaaataatttagaatttagattatattctccagttcacaatatccccaccttaatgtaaaatatattattgctaaaaaattataagaatcacctgacccttcaatgagtcataaccatttttctggtggagggtcttgcctcaatgttgatggctgcagactgatcacggtggtggttgttcaaggttgaggtggccgtggcaatttcttaaaatatttcttaaaatatttctctgtagcatgtgatgctgtttggtagcattttacacacagaacttcttttaaaattgaaatccatcctgtcaaaacatgctgctgctttatcaattaattttacattttattttttatcttccagtttacaaaccccagccccaacattcattatgtgggtgatcatgaagaagctacctgtccgttctgatcctcacaatacattgtaaacaatcaataaataatagcttgttttttttgcatttctagtgtaaatatggaatacaattctattgtgatgatacagcaaaaaaagtgttagaaagaagagtcactttctttgtgagtttttccccaaccacagtatccacaattgttaaagcaatttcctcctcaatattgtcataaaagatgtgctagtttttttcttccccatctctcatggtgaaataacagatagtttacctgttttcccctccaggccatgaactctgagaatttgggctgcatttttaaagctgtatcactggcagtttgtactcaaaaagcaggtaaatatttccctggttactccttgattttagaaggaaacacaatacacctaaacctataggatagagcaaaagcagtactaagagagaggcttatagcaaaaaactcatacttagagaagtagagagactttcaaataaatacattaatcatccacctagaaaacctagaaatgcaagaacaaatcaaacctaaaattagtaaagaaaagaaataaggagcagggcagaaataaataaaattgaagccaaaaacaattaccaaagatcaatcagacaaaaagttcatttttggaaaagataaacaaaactgagaaatctttagcagactatgagaaaaagaagggaaaagatccaaataaataaatccgagacaaaaaggagacattaaactgctaccaaagaaatatgaaggattattagtggctattttgaacaactattttctaataaattggaaaatcttgattcttcctatccatgagcatggaatgttcttccatttgtttgtgtcctcttttatttcgttgagcagtggtttgtagttctccttgaagaggtccttcacatcccttgtaagttggattcctaggtatttcattctctttgaagcagttgtgaatgggagttcactcatgatttggttctctgtttgtctgttgttggtgtataagaatgcttgtgatttttgcacattgattttgtatcctgagactttgctgaagttgcttatcagcttaaggagattttgggctgagacggtggggttttctagatatacagtcatgtcatctgcaaacagggacaatttgacttcctcttttcctaattgaataccctttatttctttctcttgcctgattgccctggccagaacttccaacactatgttgaataggagtggtgagagagggcatccctgtcttgtgccagttttcaaagggaatgcttccagtttttgcccattcagtatgatattggctgtgggtttgtcataaataatcttgaaaaaaatgaataaattattgggcacattaaacctaccgagattgaaacatgaagaaataaaccactttaatagaccaataacaaatgactatatagaaacagttaaaaaaaagtgttccatgaaataagagcccaggacatgatggttttactgctaaattctagcaaacatttggatgagaactaacgccaaatctactcaaactcttccaaaatattgaagggaagagaatactttcaaactcattctatgagcacagaattatcctgatactaatgtcagaaaaagatacaacaaaaaaggaaaactatgagccaatattcctgatgaacatagaagcaaaaatcctcaagaaaatggtaggaaactgaattcaacacgtaaaaagatcattcatcatgatcaagtagaattcatcccagggatgccaaagaggtttaacatatgcaaataagtgaacacattagcaaaatcacagacaaaaaccatatcattgttttaatagatgctgaaaaagcatttaatacaactcaatatcccttcatgaaaaaaactgttaaacagggtatgaaaggaatgtgcccccagacagtaaaagccatgtgtgacaaacccactgctaacatcacaataaatggagaaaaataagaaggctttcctttaagatctagtataaaggaatgaggcccaatttcaccacttttattcagcacagttctagaaatcctagccaaagcagttagacaagagaaaaaagtaaagggcatccaaactggaaagaaagaagccaaattgtccttgtttgcagataacataatcttatatttagaaaacctaaatatcccaccaaagaagactgttaaaactgacgaatgaattcaagaaagttgtatgatacaaaatcaaaatgtaatagatagtagatttttatatgccatcagtaaacaatctgaaaaggaaatcaagaaagcaatcccatttgcaatagctacaaaaaattacctagaaataaatttaaataaagaagcgaaagatctctacaatgaaaactataaaacggtgatgaaaaatattaaagaagtcacagaaaaatggaaagatatcccattgtgatgggttgaaagaattaatattgttaaaattttcatactactgcagcaatctacagattcaatgcaatccctatcaaaacaccagtgacattttccacaaaaatagaaaaaaaatcctaaaatttgtatggaaccataaaagaccctgaatactgagcaaagagaacaaagctggagacattacactaccagacttcaaaatatgctgcaaagctatagtaacaaaaacaacatggtactggcattaaaaaacaggtacataggctgggcgcggtcattcacacctgtaatcccagcactttgggaggccaaggctggtgaatcacctgaggtcaggagttcgagaccagcctggccaacatggtgaaaccccatctctactaaaaatatgaaaaaacttagctgggtgtggtggcagatgtctgtaatcccagctactcaggaggctgagggaggagaatcacttgaaccctggaggcggaggttgcagtgagctgagatcacaccgttgcactccagtctgggtgacaagagtgaaactccatctcaaaaaaaaaaaaaaaaaaatcagaaaaaacaaaataaaacaaaaaacatgtaaatatatcaattaaacagagaataaagaaataaatccatgcattttcaaccaacccattttcaataaaggcaccaagaacatacaccagaaaaaggtggtctgttacataaataatgctgggaaaactggatattcttatgcagaaagaaactagacccctatctctgaccacataaaaaattgatcaaaatagattaaagagatagatgtgaaactatgcaactgctagaagaaagcatttgggaagtgcttcaggacattggtctgggcaaatacattttgagttgacctccaaaggacaggcaactaaagcaaaaatgggactacatcaagctaaaaagcttatacacagtagaggaaaaaatagcaaaattaagagaaatctacaaaagagatacctgcactgtcatgtgtattgcagcacaattgagaaaaagccaagttatggaatcaacctatgtgtccaccaatgaatgagtgtgaaaggaaatgtggtaaatatatatatatgtatatgtatgtatacatatatatatataatggaatattactcagccataaaaaagaatgaaatcctgttctatgtggcaaaataaatagaactggaggacgttatgttaagtgaaataaaccaggcacagaaagacaaatatgacatattctgactcatatgtgggggaaataaaattgatctcatggaggtagtgaatagaatgctggttaccagaggctgggaaggatagggggagggagggatgaagagagttcggataatgggctcaaaaatacaatgagataaaatgaataagatctagtgttcaataacacagtagggtaacaaaagttatcaagattatatagggtatttcaaacagctagaagagaaggtttggaatattcccacacaaataaatgaaaaatgtttgaggtgatgaacatcctagttaccctgacttgctcattattcattgtgtgcatgtattaatttatcacatgtatcccataaatattgcaaaaattatgtatcaattaaaaaatcaccaccgtggactaaggcctgtccatggtgctgaagtgcatgtcaggtctgtgaagagacctgatgctacctaatgtaggcaaggctgacctcaaagtatattaatagaataaatggcagccaagctttgtgtattataagtgaaaaaggagaccccaactgggtcatgccctgcccactgccccacataaggactggttatatatttattttatcactcaatcatctcttagcatatgacacatgttagggacaatgctggtaacagagaaaacagaactagtgcatatgtggtcatagcgttccacattcctcacagtctgtgggttttctgaaggtgcaaagctgacaattgctgtttatattttgtttccccaatggtttagagcagtgcctgaacataaaatgtattgattgctaaataaatgggatttctggagatcctggcaaaatcagagcatattgaaggatgaatcagaaaaaaaaagaagtaaggggaaaatatgggagaaaggcagaaaagattggaagaaggagggggagaacatcaaagagaggcagagtccattcacacagaaggagattctaggagagaaacagagaaaggcagacagtctggctccagccaccttggcgtttcaccttccctgtattgaataaagttcaggacctttgcaggtgcagctccctccacaccctgagtcttcatgtggctccatcttgtctccaaccagtgctctgaacagagttcaccacccaagggagccctctctgactgctgtcccccgagcacctgctttgttcccttcttgaggttggtgctttctttattcactttctgtttactgctttctctccattggaatataaattccttagagtatgataaaaaagatggacctaaagttgtgagtttttattggtcctaggtttcttactggaggttagataagtccaaaggacaacaataacaaccacttctcactttcctgtgtatcattattaaaagtattatcttcctgcttctactcttacttgggaaataagaataaaatgataatggggtaagagagttggaggatacaggatagaaatgcagttatgcagtaggaattcatttgaagggagagaatgaaggaggtaattttccaggcactgctcagcatccttggagaggcatcatcatgaaattacagagagaacaggcagtggagaaggagctgtttctccccaaccacatgcatctgcaagagtgaggagtggaacaggcagagccagagaacagcagagttgaggttttccaaggaggtacatgcagcagaatatgcaagagattcgagtgtgtccagaggaatttatcctaacaattgaccatggaaggtgaccagatgggtgtgaaggtcagtgaaaaatggttaaataaagacagtgttggtctccaaagaataacgggatgtagtccttaggtgagaaagaggagtcacttggaaagtaggacgtgatgttggagatgggatgctagaactgaaggcttggagtgattttaggctaatgggagtggatggctatgggcatttggacaatagccatggaggagagagggtccctatatagctagtcaggagtgtcaggagaatcatctccattagggattatctaccctgacattattgaaaatatgatttagatagttatttgtgttgcagggaaggctgcattctgcattgtacattgttgtgtgtggaatatggtctagatagttatttgtgttgcagggagggctgctttgtgcattgtacattgttgtgtgtgaaatatggtctagatagttattggtgttgcagggagggctgctttgtgcattgtgcactgttgtgtgtgaaatatggtctagatagttatttgtgttgcggggagggctgctttgtgcattgtgcattgttgtgtgtgaaatatggtctagatagttatttgtgttttggggggagggctgctttgtgcattgtacattgttgtgtgtggagcagcactctcgcttctacccagaggatgtcagtaattctcctctacttgtgtccagacctcgccaactgtctcttgggggcaaagtcactcctagaataaaaatactaatattatatattagtatttaacattttcagctgttataatcttttaaaaatgtcaacctttgtttcagatacagagggtgcaagtgcaggtttgtgacaggagaatactgcacccagatattgggcatagtacccaataggtagtttttcaccccacaccaccatcccctgtctacgagtccccagtgtctattattcccaagtttatgttcatgtgtgctcagtgtttaactcttgcttataagtgagaacatgcggtatttgattttctattccggcattagtttgcttaggattatggcttctggctccacccatgttgctgcaaaggacatgattttattcttttttatggctgcataatattctatgatgtctatgtaccacattttctttctttctttccttctttcttttctttctttctttctttctttctttctttctttctttctttctttctttctttctttctttctttcctttctttctttcttttctttctttcttttctttctttctctttctttctttctttatctctctctctttctttctttctttctttctctctttctctctctctctctttctctctttcgatggagttttgctcttgttgcccaggctggagtgcaatggcgcaatctcggctcactgcaacctctgcctcccaggttcaagcaattttgcctcagcctcctgagtagctgggattacaggcacacgccaccacacctggctaatttttgtatttttagtagagatggggtttctccttgttggtcaggctggtcttgaactcccgacctcaggtgatccacccgccttggcctcccaaagtgctgggattacaggcatgagccaccacacctggctcacattttctttattgaatccaccattgatgggcacctaagctgattctatgtctttgctattgtgaataacatgacaatgaacatatgagttcatgtgtctttttggtatagtaacccattttcttttgggtatgtacccaataataggattgctgggttgaatggtagctccattttaagttcttttagaaatctcaatactgctttctacagtcactgaactaatttgtattcctctcaacagtgtataagtaagtgttcccttttctccgcagcctcaccagcatctattgttttttgacttttaatagtagacattctgactggtgtgagatggtatctcattgtggttttgatttgaatttctctgatgattaatgataaagagtgttttctcatgtttgttgaacgcttgtgtgtcttcttttaaggagtgtctgttcgtgtcctttgtccattttttcattgggttatttggtttttgcttgttaatttaagtttcttatagattctggatattagacctttgtcagatgcatagtttgcaaatattttctcccattctgtaggttgtttgctctattcagtttccctggctgcacagaagctctttagtctagtagggcccacttgtcacatttcctttttgtttcaagtagttaatatttattttctttcttttcagatagtgtcttgcaatgtcgcccaggctggagtgcagtggtgcccctcctgttgtgaatgtgagtaacaaaccatcttttcaatggcagtctcctgctgacctgtctacctgttgtgtgtgaagctgtgtgattcaaatcagcttgaattacatttttgtgagttctggaaaacccagacaccatctgttcttgtgtgcgagtgtgtgtgtgtgtgtccgtggttgaggaagtttggaagacaccccatggtcaaacaaggtggagtctagggccactttccctgccacatggctatcttattagaaccctgcctaccacaaatgcccaatcccaagggtaaggcaagacagcagccctggaatccctcctttggacggttccaggacccttctccttggatgctcagagatgggatgaagagcaggtaagggaggcgtgggctcagggccagaaagcctggtaacctccccttcctgagtcctgtgtcctcctctgtaaaatgcagacactcctgggatgtcactcacagccagggctgctgggcttattgtactctgcagttaggctcctgtctgaggagatgaaaggatgtgaaatccagcctgtaccatcttcacaagctgtatccatgcctgggctgcaggatttcaaccacagcatagcattgacctgtccaaaagccccaaagcctatcatggccatgtatgcagttattgctacttgggaaaaattcttattaaacagaaaacaagcataggtgaagatacccattttgaaacaatcttattttttatcttttaatttgaggtgatgctcattgtcttataaggggcctttgccatcactagatggcattcttgcatcatggaaaactacacaggagctcctttaaaaatcaattttgaactgtggcaaaatacacatcacataaaatttaccatgttaaaattgtacaaagtacaattttaaaacgaatattgaccatgaccataggtttataattttaaaaattatttatgttttcagttatttttcaactttttattttttaacttgcattttaagtccaagggtacaagtgcaggtttggtatataggtaaactggtgtcatgggggtttgttgtacagatgatttcattacccaggtattaagtctagtacacgttcgttggttttcacaatcctctccctcctcccacccttcaccctccaatgggccccagtgtgtgttgttcccctctgtgttttcatgtgttctcatcatttagctcccacttgtgggaaacaacaggttgtgtttggtttctgttcctgtgttagtttgccaaggataatggcctccagcttcatccatgtccctgcaaaggacatgatctccttctttttttatggctgcatagtattccgtggtgtacatgtaccacattttctttatccagtctatcttttatgggcatttaggttgatttgccttttcgaaatatgctaacaggcatataaggtaactgatcactataattatttttacttgtatagtccactggtgtgaagggcattcacattgttctgccacagtctccacaaactatgtcccatattttgttaatcttgcaatactgaaactctgtgtccattaaaccataactccccatttcccctcccctatcccctggcaacctccattccactttctgttcctgtgaatttgactattctacgtcgaatctattatacttctaatatacaagtgaaatcatacagtttctgtccttttgtgactggcttgtttcacttagtgtaatgtctcaaggttagctcatgttgtagcatgtgtcagaatttcctttctttttaaggctaatagttcgttgtatggacagaccacacttaatgtccctctttattctttgatagataccaggctttgctgccaccttgactattatgagtcatgttgctatgaacttgggcatgcaaatatctcttcaagaccctgcttttttttttttttttttttttttttttttttttttaagacggagtcttgctctgtcacacaggctggagtgcagtggcataatctcggctcactgcaacctccgcctcccgggttcaagcaattctcctgcctcaccctccccagtagctgggactataggcacatgccaccacgtctggctaattttttgtatttcagtagagacagggtttcactatgttgcccaggctggtcaccaactcctgagctcaggcagtccgcccacctcggcctcccaacgtgctgggattacaggcatgagccaccgcgcccggctgaagaccctgcttttaatgctttgggctcatatacccagaaacagagttgctagatcatatgggaattttatttttacttttttcagaaacttttatgtagttttccgtagtggctgccttatatcacaccctaacaacagcacaaaagttttccaatttctccaaaacctgccaatacttcttatgctctgtcttgtggatagtagccatattattgagagtaacgtgatttcttttctctttggaaaaaacatactatttatttcacttttcaatatagcttaataataggagctatgtgcctgttgggcactgcacgacttctcacactttggaatcagcctggaaaatgtcatcctcagttccttgtctttgctgacttttaggtggtacttgctgttcttcacagcgaccactgacaacccagcatcacaaatatgtgatgtgagcaaaaggaaatgtagagggatctaatgtggagactgtgagcctctggagctggtagtttgtgtgatgcatgatgatatagaatattgctgtggttcctttccatcgaaaatatagctattcctctgccgacatttgcagctgtgagaacagaacggcaggaatgcagtaggtgttcattggaggggtcgagtggaggagctcatctggttgccaggcattgctcagtgtccttggagatgagttgccatggaaacagtgaggggcagagaggaggggccgttcctttctagccaagtgagctgcagagacgaaggaaagtgaggcggacgtcccacaatgtcttaaaaatcctctcccattgacacattcagatggcctccatttataatttcatgtatatctgttctgcctgtggtttccaaaaagcagttcaaggcctgctaggggaatcaagaccctttcagtgttccaaactatgtttctaagatcagggaaattgtatttgcttttttccttcccatttcctctgcatgatgtaatattgcaggtgtttgaattaagtagtctatccggccagcagttttttcatggggaaaaaaaaccagaacagaattaaaaaatcagagcatgtggcttagagtaagtgccattcctttaaactttcacttcagttacacagacatttactcacagacacacacacttgcatgtgcactggatcaacatggagaaggtgtgggttcctggggcctgcagtgaccaatttttttttttttttttgagacagagttttgctcttgttgcccaggctggagagcaatggcgtgatcttggctcaccacaacctctgcctcccgggttcaagcaaatctcctgcctcagtctcccgagtagctgggattacaggcatcccagccactatgcctggctaattttgtatttttagtagagacggggtttctccatgttagtcaggctggtctcaaactcctgatcttaggcgatctatctgccttggcctcccaaagtgctgggattacaggcgtgagccaccacgcccggccttgcagtgaccaaagtttcagtggtgctggtgtgagccaagcttccaattttcacagacacggactcaggggtgatgctgcagctgcagtagttgatagctcagggcccataaccaaggggatcttttcctccctgctttttattatggaaattctcaaaaatgcacaaaagtagacagaataatgtatacccactgtgaaagcattcagctatcttctcctttttttccttctagtttaagtaaagtaaatcccagaaataatataattttacctacaaatacctcagtacatatgtctatcagatcataatttaacataatatattaaaggaatttgcaaaaatgtaaaataatgccacctgtattactattttttttgtttggaatatgcagtgtaattattgttcaaaaaagtgtgttatgataatacacaatagatttattgcaaaatttattattttattttattcatctattttgagatggaggcttgctctgtcacccaggctggagtgcattggcgtgatcttacctcactgcaacctccacctcccaggttcaaacgattctcctgcctcagcctcctgagtagctgggattacaggcacccgccaccatgcccagctaatttttgtatttttagtaaagatggggtttcactatgttggtcaggctggtctcgaactcctgacctcaagtgatctgcccgcttcagcctcccaaagtgctgggattacaggcgtgagccaccgtgccacaatttttataattttaaacttaatattttcaaatgtcaatgtataatatggcaaatatacatagatacaaattgtaaccaacaaaattaatcataattccttatttatcatttaatatctagtcctacatttctggggaactttataaccttttctaaaattttaagcaatgcaagtaaattacatcaatgcaaaaatatttaactttgttcaagttgaaatcacgggcacctagtggggcaacctgaggcagaggcagcagacgctgggatccacaactgagttaagaccacaaggcaacttcctcaggctgcaaatcccaacccgagccgacatgaaaatgctcacaactgagaatgatggtttccagcttcatccgtgtccctacaaaggacatacacatgtatacataggtaacaaacctgcacggtgtgcacatgtaccctagaacttaaagtataataaaaaaatacatatataaaataaaaataaaaataagggccgggcgcagtggctcactcctgtaatcccagcactttgggaggccgaggcgggcggatcacgaggtcaggagatcgagaccatcctggctaacacggtgaaaccccgtctctactaaaaatacaaaaaaaaaaaaaaattaggtgggcacagtggtgggcgcctgtagtcccagctacttgggaggctgaggcaggagaatggcgtgaagctgggaggtggggcttgcagtgagccgagatcgcgccactgcattccagcctgggcggccgagcgagactctgtctcaaaataaataaataaataaataaaacttttaaaaaaagcttgaaacctaaaaaaaaaattaaaaaaaaaaatgaagatatgctaacaccacccccccccccccccgccaaaaaatgctcacaactccatttaagcgtacatctgagtttcttacggaagggaattacatctcgaggggatagtggcacaatgcgggggactgggtctatttcgtaggtaggagccttattctccaaactccaaatcaggacttgcaggctgaaaactaccgtttactctgcagacatcagggcaggagagcagcccccagctgatcacctctacaccccaggcccccacctctgtcggccagtggacttctctgtcaatgtgctcattgcttcaggtgaaaccagcactgattcatgtccccgtcagctcctcaaggccctcagctcttcctcaatggaaaccaaaaactatgtgagtctggtctcaatcacttgagaagtttattggccgggcctggtggctcacgcctgtaatcccagcactttgggaggccgaggcgggtggatcacctgaggtcaggagttcaaggccagcctggccaggatacacactgccacattactacaatgctattgttctggctgagaaaacaatactccagaagcaacctcagacacaaacgtttttccttgaccatctcctatcctcctgtcattcagccccattcttcccttgggctagccatagaaactagaatccctcctttaaggtgggcgatagaaaccagaatgccttttccccaaagccagttataaaatccaaaaatattactttaattttccatccatccttctgttgaaaaactggccataaagaaacctggctgggcgccggtggctcatgcctgtaatctcaggattttgggaggccgaggcaggcagatcacttgaggccagcagtttgagaccaacctggtcaacatggtgaaaccccgtctctactaaaaatacaaaaattagccaggtgtggtggctcatgcctgtaaccccaactactcaggaggctgacacacgagaatcccttgagcctgggagacagaggttacagcaaatgctgagattgcgccactgtactccagcccaggagacagagcaagactcagtctcaaaaaaaataaaaataaaaaaataaaaataaaaaaaatgtctgatctaccttgtccgactgtaggttacaagaccctcattccagagagtgtccctgcacaaagaggccaaggagaatctaagcagacaaacctcatgggtttccccactcagtccactagcattaaaccagacccttagcatccagtatttctacgtggctctccacactttgtagaacctaagcataaaaatgggcaatttctcccgtatctttgggtgttcattcttaaagttcccatgcgtacatttgtttttttttttttttttttgaggcagggtctcgctctgttgcccaggctggagtgcagtggtgtgatctcagctcactgcaaactccacttcccgggttcaagagattctcctgcctcagcctcccaagtagctgggattacaggtgcacaccaccacacccatctaagttttgtatttttagtagagatggggttttagcatgttggccaggctggtctcaaactcctgacctcaggtgatctgcccaccttggcctcccaaagtgctgggattacaaggttgagccactgcgcccggcctccatatgtacgtgttaagtaagcttgttataccttttctcctattaaccaatctgctttatgtcactgattttcagtgaaccatcaggaggccaagggccttggcccctacaccatcccattgttcctatggctttgaattctcatgggaaatgtaatccaggcctgtctgattccttgatttgccaggctgcctaccctgattaacccagcgaaggaatttcaatggcaagtgtgcttggactccagtgacccgggcttgtcgagatcgcctctagcataggatcagtttagaattctcagaagagaaggtaacatgtagattcccaagattacaaatcctaactttcattatgtgggtgatcatgggctagacacctcccttttctgagcctcattttcttttttttcttttttctttgtttgttgttgatgttgttttgaggcagggtttcactctgtcacccaggctagactgtagtggtgtgatcatggctcactgcagtcttgacctcctgggctcaggtggtcctcccacctcagcctcctgagtagctgggactacaggtgagtgccaccatgccgagctaatttttgtattttcttgtagatagggggttttgctatgttgctcaggctggtcttgaactcctgggcccaagtgatctacccacctcagccttgcaaagggctgggattacaagtgtgagccaatgcgcccagaccctctgagcctcatttgtttttacctgtcaatgagtgatagacatgggtaaaattttgacacaatgcccaatacattgtaagcaattaataaatattagttgggtgtttttgtatttctaacataatataaaatacaattttaatttagtaatatgagccaatgagtgttagaaatggtaattaccttctttgtgatgttttctccatccgctgctttcacaattgttacaagctccacctcaacactgtcataataatagtgctagtaggccgggtgtggttggtcacgcctgtaatcccagcactttgggaggccaaggcgggtggatcacaaggtcaggagttcgagaccagcctggccaatatggtgaaaccccgtctgttctaaaaaaatatagaaattagccgggcgtggtggcaggcgtctgtagtcccagctactaaggaggctgaggcaggagaatcgcttgaacccgggaggtggaggttgcagtgagccgagattgtgccaccgcactccagcctgggtaacagaacgagactctgtctcataataataataataataataataatagtgctagtactcttgtccacatctctcatggtgatgtaactgactgcctgtttcccacaccactccatcagaatttgggctgtgtccctaaaacctgtattaccagcattttgcacttgtaaaccaggtaaatagttccctggttaagcacctgatttaaaaatcagcacagcccagccattgaccacgacctgtccatggttctgaaaggcacgtcgagtctatggactcaccaactggcaacggagattgttgatgctaacttgtgcaaaggtgacctcaaagtatatttctgtagggtccagccccacagggtcggtgggtctctccccatgtgtggagacgagagagtgtagaaataaagacacaagacaaagagataaaagaaaaggcagctgggccagggggaccactaccaccaagtcgtggagactggtagaggccctgaatgccaggctgcactgatagttattggatacaagacaaaggggcaggataaggagagtgagccatctccaatgataggtaaggccacgtgggtcacgtgtccactggacagggggcccttccctgcctggcagccaaggcagagaaagagaggagacaaagagaaagacagcttgcgccattatttctgcatatcagagacttttagtactttcactaatttactactgctatctagaaggcacagccaggtgtacaggatggaacatgaaggcggactaggagcgtgaccactgaagcacagcatcacagggagacggtcaggcctccggataactgtgggcgagcctgactgatgtcaggccctccacaagaggtggaggagcagagtcttctctaaactcccccggggaaagggagactccctttcccggtctgctaagtagcgggtgttttcctttgacacttacgctaccgctagaccacggtccgcctggcaacgggcgggcgtcttcccagacactggcattaccactagaccaaggagccctctggtggccctgtctgggcataacagaaggctcgcactcttgtcttctggtcacttcccactatgtcccctcagctcctatctctgtatggcctggtttttcctaggttatgataatagagcgaggattattataatattggaataaagagtaattgctacaaactgatgattaatgacattcatatataatcatatctaagatctatatctggtataactattcttgttttatattttattatactggaacggctggtgtccttggtctcttgcctcggcacctgggtggcttgccacccacgtatttcaggaataaataaaagccaaattttgttgtgttgtaaccaagaagagaaagccccaatttggtcatgtcctgcccacagccccacataaagatgagttaggtgtgtgtttctcacatcaacagccccttagcatgtgccatgtgttatggatactgctgggatggaggaaagatggcagaaatagtgcatatataatcctgcattcaaaactcctcacagtctgtgtgatagaaagaatgaatggcagggcgctgtagctcatgcctgtaatcccagcactttgggaggctgaggtgggggatcacttgaggtcaggagttcgagaccaacctggccaacatggtgaaaccccgtctctactaaaaatacaaaaattagccgggcttggtggtgggtgcctgtagtcccagctattcaggaggctgaggcaggagaatcgcttgaatccgagaggtgcaggttgcagtgaaccgagatggcgccactgcaatccagcctgggtgacagagcaagactctgtctcaaaagaaagaaaagaagagaaaaggaaaagaagaggaagaaaacaaaagaaaagaaaggaaagaaaaggaaaggaaagaaaaagaaaggaaagaaaagaaaaggaaagaaaaggaaggaaagaaaaggaaaggaaagaaaataacccaaaataatgggcttctgaggttccaggttgttaatggggattgaataggtccaaaaaacccaccaaaacaactatatcttctttcctgttgaacatttaaaaatattcttttaacatttctacttttgtatgggaaatagaaatctgatgacaatggggagagagtgttggaggcttcaggatagaaagcctgcagtggactatgtattcattggagaagagaatggaggagctggcctggttgccaagcaacgctcggtgcccctgagattggagatgactcaccaggaaattagagtgagcgcaggcagtgagggagaggctgttgtgccccatcaagagcagcttcaggacaaagaaaagtcatgtgaatgtcctgcagtttctctaaaaaaatagcctgtttgttgtacattcagatgatctccatttataactttatgtccattacttttatatatcttagcccactagttccaaaaatgtagtttaaaaacttctggtggggcgggggcgggaatcaacttccttttaaagggtccagaattccaaactattgtgctaagaacgttaagattttattttcctatttccatctcattttcttcatgatgtagtattgtgagtatttgacttactgaatttgagaatctgtcttgtattaaagggttttattgcaaaaatatgaagcaatgctacctatattactgtgttttgtttggaaaatataatcgttgttcataaaaaacatgtttgttaacaaataataggtttgttacattttagagttttaagtttagaattttctgagctccaatttataatatggtaactgggtaaaaaatacaaattatgcaaataaaaattatctgaggatccccagttactttgaaaaatataaaagtggactgagatttaaaagtttcataattgctctcttaggttaagtacctaggtatcatctgattgggtggagtaaagcacacctttaatgtttttgacacgtgaattctcgttgctgaagtgatagacagctgttcctctagctccaaattctcacgggaaatgtaatctaggtctgtctgactttaattaatttgtcaagttataaaatcaacctaagtgaccatcaacagatgaaaaacgtggtatatatatatgtgtgtatatatatatatatatatatatatatatatatatatacatacaatggtttattattcagccatgaaaagagtgaaatcttgtcatttgcagcagtgtggatggaactggaggacattatgttaagtgaaatgagccaggcacaggaaggcaaatatcgcatcttctcactcatacatgggcgctgaaaaagtagatctaatggaggtagaaagtagagtgatggtttccagagactgagaagcagggaagattgggcaatgggtaaaaatggttaaacagaaggaataatgtctagtgtttcatagcacagtagggtggctatagttccgaagtatttatagtatatttcaaaatacctagaagagaagatgtggaatgttcccaagaaaaataaatgagaaatgtttgggtgatggatagcctactcaccctgatttgatcgttacacattgtatgaatgtatcaaagtatcacatgtaccctatcaatatgtacaactattatgtgtcaatttaaaaaatcagtgcagtcccatcaccgataagacctgtccatggtgctaaaaggcaccttgagtcttgaactgatggcatatgccaagtgtttggaaccatactggatacagaggaatgaatgcctgtatgatccatgcatttaaacttttttacaatacatgagtattctgaaggtactaagctggctgttacaaggttcatattcttatttttccaatggtctagagaattacctgtacataacgtgctgattgctaattaaataggattctggagaccccaacaatattagactatgttgaaggaaggataaaacaaaaataagaaagagaggggaaaatagggagggagtaaaatggaagaaggatgaagataacatcaaagagacagagcagagtccatgcagacagaaggttttctaggagagaaatagggagaggtaaacagtttggctccagccacgtgggccactctcttttcttggaatgaatcatcctcaggacctttgcacatgcagttccttccatggctctgggtcttcatgtggctccttcctgtctccattcaggattctgagcagagttcaccacccaggggagtcctcactgattgccaccccgaagtacttgctttggttccattatgaggctgacacttcctttttaaaaaaaatacagtctcactctgtcacccaggctggagtgcagtggcacgatcatagctcactgcagcctcgaattcctgggctcaagcaatcctcctaagtaactgagaccacaggtgcacaccaccacacccagctgattttttctttaagacagagtctactcactctgatgcccaggctggagtgcaatgccacaatctcagctcactgcaacctctgcctcctgggttcaagtgattctcttgcttcagcctcccaagtagctgggattagaggcatgtgccatgaggcttggctaatttttgtattcttagtagagatggggttttgatatattgatcaaactgctctcgaactcctggccccaaatgatctgccttcctcggcctcccaaagtgctgggaattacaggcatgagccattgcactaagccccagctgattttttctatttttagagatggggttttgctatgttgcccaggctggtctcaaactcccgacctcaagcaatcctcctgtctcagcctcccaaagcatggggattacaggcataagccactgcacctaaactgatgcttcttttccttgcttactgtttgtgctcttccttgcctggaatgtaagctcagagtgtggtagaaaaatatacctaaagttgcaagtatctcaggttttaggtttgttactggagatagaagaggttcaaagggcaaaagtaagaattgtatctcatttccttttggacatcattaaaaatattatcttaatcttgttacttttgtttgggaaataggaataaggtggcaatgggaatgaaagagttgaagtcttaagatcagaaaagtctgccgggggcagtggctcacgcctgtaatctcagcactttgggaggctgaggcaggcagatcacttgaagtcagaagttcgagaccagcctggccaacacggtgaaaccctgcctccactaaaaatacaaaaaaattagccaggtgtggtggcgcgcacctgtaatcccagctactctggaggctgaggcaggagaatcccttgaacctggaaggtggaggctgcagtgagctgagatggtgccattgtactccagcctgtgtgacaagagtgaaaaactctgtaaaaaaaaaaagccattatgcagtggtcatgcattgaagtagtggtgtgcatagaggagctggtcctgcttccaggctgtgctcagaatccttggaggtgagtcaccatgaagtgagggtgagaacagcaacggggtagcagctgttcctttctagccaccaggagtgaggagtaagggggagggcaagggtagtcagagcccaacagggatggggttttccaagagaatcacatgaaacagactatgaaagtggagtgtgtgcagaaagaatccatttcacagattgaccctagaaggtgacttggatgtgggagtgaagttttgataaaaatggtggaatcaatggagcattggtccttaaaggataaaagaatgttggtatcaggagaggaggataagtcatctgttaggtaggatgtgatgttggagatgggaatgggatgctggaaatgaggggaatgaatgatcttggttattgataagtcatctgttaggtaggatgtgatgttggagatgggaatgggatgctggaaatgaggggattgagtgatcttggttattgataagtcatctgttaggcaggatgtgatgttggagatgggaatgagatactggaaatgaggggattgagtgatcttggttattgataaatcatctgttaggtaggatgtgatgttagagatgggaatgggatgctggaaatgaggggattgagcgatcttggttattgataatgacaaggcaggtaggagcgggtggcttagggagattgaacaaaagccttggaggagaggaggtcaatatggtgatggtcaaacatgttgggaggatcatctgtatcatgtattctcttccagggtaacactgaaaatttggtaggatattctttgttgtggcagggagggttgtgctaggcagtgtgggttgctcaggggcattcctggattctcagcagctctccactcctgtgatgactaaaaactccttcagacactgccaactatctcctaggggcacgagggctagcccaagcctgagggtggaacaacacagaagccctggaaaccctgctctaggaggtgccagacccctctccttggatgtcccgagacaggctggaggagcaggtgatgggggtgtgggctcaggaacaggcagcctggagacctcccatctctgagcccagtgctttctgtaaaacatggacactcctaggaacttgctcacagccaaggctgctggggatggttgtgtgtattttcccctgcagttagattcctgtccatagagctgaccagaatttgaaatccagcctgcactctctctacagttatgcccacaccctagctgaagaatctcaccagagccataccactgaaactgtctttgcaaaaattacaacagcaaaaattatgacagtgaaagagatctgatctaaccgatccccatcttgcctttaacctccaaagtgcctagatcagtgctgagtttaggccaagttaatctggggagaggttttaattcataatttaagtgatagtagcccttccccccaaaaaccaaaactgcctttgtaaagctaaagaaaggccaccaggttaggaggatgagcctgaattctgctcaggtgtagacttaaatggtaaccaggagtctggaggtcataagatttgccacttccacaattacctctgcagataacatcgctcttgtagaacctaagattggccttttgaaatgtcttttcaggtttttgcatttccgatggccagtggctccattcgaatctgtcaacccaccaactggtcctttagccccacccagaagtggagtccctggcccaccaaactagccttgaaaaaccctaacctttgaattttcaagaagattgatttgagtaataactgtctcccacgctgcgtggccagcctcatatcaataaactctttgttgtagtgtcatggcctcagtgaattgttttttgcttgtttgttttgttttttcgttttcatttttgtttttgagatggagtcttgctttgtcgccgaggctgaagtgcaatggtgcgattgcggctcactgcaacctccgcctcctgggttcaagcgattctcctgcctcagcctcttgagtagatgggattagaggcacccaccaccatgcctggctaagtttgtatttttagtagagatggggtttcaccacattggtcacctgctctcaaactcctgacctcaggtgatccgcctgcctcagcctcccaaagcgctgggattacaggcatgagccaccgtggctggtgtctcggtgaattgcttttttctgtgcagtcagcaggaagaaccagcccatcaggaggttacaccattgcagatcaatccaaagtcctacagccttccgcggccacgtgctcattaataaaatttggggcacaaattcttttcaaagaacaaacaagaaagtgacacagcaatttttagggtctcatttttttatctttcttctcatttgatgcaatgcgtatgattttatcaaatgctatcaagcccatttgccacagctagatggcactgtggaagcattcgaaagtaaataggcattcctagttaaaaatctggcaaactacacaggatataaaatttaccatatactccatattttgctaatattaattcataagcaaagactttcaagtttgttttaaatttttgaataaaaatgggttaaattattacataattcaatatttatattttaatcatttttaagtgtgtaattcagtgtcattaattgcattcacattattcacaaacatcaccaccttccatacccagagtagttttcatattgcaaaaccggaattctgtactcacgaaacactaactctccgttccttctctcttcgcccctgggaaccgccattgtactttctgtttttataaattagactagcttgggtaccttatggaagtggaatcatagagagttgtcgctttgggactggcttattccccttggcatcgtgctctaaagttcttccgtgtcgtagcatgtgccagggttttatttctttgtaaggctcagtaatattccatcgcatgcaaaaaccacagtttttttttttgacagagtcctgctcttgtcgcccaggcacgacctcagtgtggcatgatcattcagtggcacattctcagctcactgcaacctcgagatcgctcagtggcacgaactcggctcactgcagcctccgcctcccgggttcaaacgattctcctgcctcatcctcccgagtagctgggattacaggcgcccgccatcatgcccggctaatttttgtatttttagtagagacggggtttcaccgtgttggccaggctggtctcgaactcctgacctcaggtgatccacccccatcagcctcccgaagtgaaaaaccacagtttgtttacccattatccactcctcccttgatggacacttcagtttctctacttttgactattatgaataaagctgctataaacacgagagtacaaatatctctttaaaacactgttttcaatttttgggggtatatacccagatgaggacacaggtggatcatctggtaactttattaagaatttaacggaaaccatctcacttccaaagcccctgtaccacatcacattcccaacaacagggcggaaggcttcttatttttccatagcctgccaacacttgttatattctgttttatggataatagccatgttaataatgtgtggtggttccttctttctcttaaaatctattttttcgatttttcaacaatgacaattattgaataatgggatatgtgtgtctgctgggcaccgtgcaatttctcgaactttcgaatcagatggggccatgccaccctcactcctcattctcactgattttcactgggggattgcttttcttcacagcaagcactgacacctcagcttcacagagacattgtgtcagcccaggaaatgtagagagaccaaatgcagaatctgtgaaccattggagctggtagtttccgtggcctcggatgcggaatgttgctgttctcccctcaattttaatgtatccagggatcctctgcagacaattgcaggtatgaagatagaagagcaggaaggcagtaggtcttcattgcagggggagagaatggaggagctggtctggttgccaagcaatgctcagtgtctttggacatgagtcaccatggaaactgagtgacaactggcagtgggggaggggctgttctgccccagccaaatgcagctgcacagaatttaaaaagtgatgtggatatttcacagtttcttgaatcaataacgtctcatttgtacactctgatggtctccatttgtaatttcttgttcattattggtgtatctcttaggccagtaatttccaaatgtagtaaatcaagatctttgtaagggttccacaacttcaaactatttttctaaaaacattaattttattttattttattgatttttttgagacaaggtcttactctgttgcccaggcaggaatgcagtggtgccatcacagcttactgcaaccgcgatctcctaggctcaagtgatcctcccacttcagcttcctgagtagctgggactataggcacacacctccatgcccacctggtttttaattttttaatttttagtattttttatttttagtagaggtcttgctacattgcccaggctggtctcgaactcctgagctcaagcgatctgccctccttggcctcccaaagtgctgggattacaggtgtgagccactatgcccaaccagaacattaatattttatttggcttttttccttctcattttctctgcatgatataatttatgagtagattgaggaaatctatctctcttctatttaggaggaaattaaagggatttgcaaaaatgtaaaacaataccacctttacctttactaagattttatttgaaaaatattaatgttgttcataaaatgtgggttcttttaacatataatagatttgttgctgtttttaagtttaaaattgaacaatttctcttcttttatttataacatgactaatataggatatataaactgtagaaagaaacattcttcggggatttctcaataatatttaagagtattgggattctgtcgatgacacaaatggagggaaaatcattccatgctcaaggattggaagaatcaatatcattaaaatggctatacaacacaaagtaaactacagattcaacgttattcctatcaaatgaccaatgtaattcttcacataattggaaaaaacaatctgaagcagcaagaacaaagttggaggtatcacattacccaacttcaaactgtaagactacagtcgccaaaacagcagggtactggtacaaaaacacacgtagaccaatgaaacagagcagagaacccagaaataaagctactcacctacagccgtctaatctttgacaaagttgacaaaaaaaaaaaagcaatccaaaaggactctctattcaataaattgtgctgggatcactggctagccatatgcagaagaataaaactggacccctacatttcaccatatacaaaaattaactcaaggtggaataaagatttaaacgtaacacctcaagctatacaaatcctagaagaaaatctagaaaacaccattctgaacttgggccttgggaaataatttatgactaaattctcaaaagctattgcaacaaaaacaaaaattgacaagtgggacctaattaaactaaagagcttctgcgcaagaaaaaaactttcaacagagtaaacaggcaacctacagaatgggagaaaatattcacaaactgcatctgaaaaaggtctaatgtcaaaaaatctgtaaggaacttaaacaactaaacaaggaaaaaccaaataaccccattaaaaattggcaaaagatatgaacagacgcttctgaaaagatgatatataagcagccaacaaatatatgaaaaaatgtttataatcgctaatcatcagagtaatgcaagtcaaaaccacaatgagacatcatctcacacgaataagaatggctattaataaaaagtcaaaaaacagtaatcgctggtgatgctgtggagaaatggaaacacttacacactgttggcaggaatgtcaattagttcagtcactgtggagagcagtttagagatttctcaaagaacttcgaacagaactaccatttgacccagcaatcccattactgagtatatacccgggcatggtggctcacacctataatcccagcactgtggaaggctaaggctagtggatcacctgaagtcaggagctcaagaccagcctggccaacatggtgaaacaccgcctctactaaaaatacaaaaattatccaggtgtggcggcgggtgcctgtaatcccagctactcgggaggctgaggctggagaatcacttgaacccaggaggcagaggttgcagtggagattgcgccactgcactccagactgggcaagaagaatgaaactctgtctcaaaaagaaaaaggaaattgagaatacaatgactaaaatttgaaatagataatgtaaccaacttttccgttatgtttggggtcattgctatggcaacaataaaagggttccctatttcccatcagtcttaagcaagatctagtggcaacctaactgatactgctggcacttaaaaagcaaagactaggcgtggtggtgtatgcctgtaatcccagcactttgggaggctgaggtgggaggatcacttgagctcaggagtttgagaccagcctgagcaatatagcgagactagatccctacaaaagttttaaaagttcactgtgcgtggtggcaaggatctgtgattccagctcccactcaggaagctgagatgggaggatcccattagcccaggaggtcaagactgcagggagtcatgatcacaccactgcattccagccttaatgacagagtgagatcctgtctcaaaaacaaacaaacaaaagccaaaacagcatggtaaaaatattttcatagaagaaaacagtcggccaggcgcggtggctcacgcctgtaatcccagcactttcgaggtgggcggacaacaaggtcaggagatcgtgaccagcctggccaacatggtgaaaccccatctctactaaaaatacaaaaattagccgggcgtggtggtgcacacctgtagctccagctacttgggaggctgaggcagaataatcgcttgaacccagaaggcagaggttgcagtgagccgagattgcaccactgcactccagcctgggtgacagagtgagattctgtcaaaaaaaaaaaaaaaaagaaaagaaaagaaagtcgaaattatttgaggtgtataattgttttcttagccagtatgcatgttttaaatttaggacaatttatcattaactatagaaattataaaggtaattaaacccatattactcatgttctgaaccaagaaagcagcatatttggcattctaaatacttacaaaacataaaagactgctagagcaacaagtcagccttgtaattaaatatgaaaaatcaacttttggttgttgataagttgtatctcatgcttactttctgtttcactgatttctacttttaactttattatttccttccattcttcccctttctttcctttttttgagacagggtctcgctctgttactcaggctagaatgcagtggtgcaatctcggctcactgcagcctctgcctcctgggctcaagcgatcctcccacctcagtctcctgagtagctgggactacaggtgcatgccaccatgcctggctactttttgtagagatggggtctcactatgttgcccacgctggtctcggacttctgagctcaactgaaccacccacctcagcctcccaaagagctgggattacgggtgtgagctattgcgcctggccttccttccttcttgtttctttagactcaattttgtttatttttcacctttttgaaatggatgattaaataatcaattttcagcttttcttgttttctattataggtatttaaggctgtacatttctatctaagcacagctttatataagtatcataagttttgataaataatgttttcattattttgcagtccagatttttaaaatttttattttttgactgatgcattatttagaaatatattgcttaattttctaatatatggatgtttttgagttttctttttgtttttgtttgtagttaatttataccatgatcagaaaccatactccgattcagttctttgaaatttgttgagaattgctttgtgttctgtatttggttaattcatgggtactttatatgattgtctcttctagttattgggtgcagtgttttatgtacaccagttgggccaggtttgtaatcacgatgtttaaatattcttgtttaaaaattcacaatgtttaaaaattcttgtttcttgtttatttcgtttttcagttactgagggaattacgttaaactctcctactaagaatatgaattcatttatttctatttccaaaaagagcatgagtgttctaaaataaaaggtttgaggattactctcctagaataaatttctagatacagtttcactgaatagaaggaaatacaccatttgtggtttctgatacatgatgtcaaattgtgacaatgcttttcagtagtgttcctgggccccgaattctcatggggaatgtaatccagcctgtatgacttttcccaatttgccagcctgcctcccataatagacccagtgatggaatgtctatgagaagcatgcttgggctcctgttacctggacttcaaaagatatcttctaatataaaaacttttagagttgtcaaaagagatggtagattgcatatacctgggtttaccaaccacggccccaacattcattacatggatgattatgagccagacacgtgccctttctgagccttgcttcttgcacctggaaatacaggatgaggttggtaagaacttgacaaaatacattctaggtgcttaaaaaatcattgctgggatttgtttttttgtattttcacaataaatatgaaaacagttttaatttaatgattatgaacaaaaaaggatgaaaaccaatagtcagtttctttgtaaaattttccccagccagtctatcatcaagtgtttaaataattccctccttacaactgttggagtaggtgtcacatctcttgatttccataacttctggtgctgtaactggctgtttgctgttttccctatcaggccataaacttcttgagagtttgtactgtgtcttgacaacctgtttcactagtgctttgcatccaagaagcaggtgaatatttttctggtgaagcccttgattaatcagtacagccccaccattggctgagatctgtccgtggtcctgaaggtcacacttgagactattaactcattcacaggaaagggaggcagctgattctagctgacttgtgcaaaggtgatctccacatacattcgtggaataaagtgaggacaagctttattgtttagtgaaaagggaaggccacaaatgagttcatggcatgtccacaatcccacataaagtctggttttatgtttattccatcactcaacagtcacttagcaaatgctgtgttagggaaagtgtgggggcggggtggaggcagaggaaaaaaaacagaaataatgcatatgtgattcctgcattcaaaatttctcacagtctgttggtattctgaaagtactaacctgactattacatgttcatattctttttgttttttgagacagagtctcactctgtcacccaagctggagtgcagtggcacaatttcggttaactgcaacctccacctcccaggttcaagtgattctcctgcctcagcctcctgagtagctgagattacaggcacgcaccaccatgcccagctaatctttgtatttttagtagagacggggtttcaccatgttagccaggctggtcttgaacacctgacctctagtgatccacctgcctcagcctcccaaagtgctgggattacaggcgtgagccaccgcgcccggccttgttcatattcttgtttctccaattgtctgtagcaatgcctgtacgtaaaatgtgttgactgctaagtaattgtgctatcaggagaccctgaagaaataagactatattgaagaatagataagaagaaatagaaaaatataagagaaagagaaaatatagggaggttgtaatatgagagaaaggatgagaaagtgaaagagaggaagaagagcatattcagatagaaggaaattctaggagagaaatagaggtgaattatttctctctaggagagaaatagaggtgacatgagcctctgtgtgggccttgaatgagccacccccaggacctttgcacgtgctgttcccactgccacccgggtcttcacaagattcctcctgtcttcacacagggctctgatcagaggtcacctctcatggaagcggtccctgactgctgtccccaaaagcccttcaagcacctcctgcattccactcatcatgaggctgacttttatttctccctgtttctgcctgtacttacagtggaatataaactcaatgaacaatggtagaaataagaaactcctgttttgagattcttctggtgccaggagattgttactggagatggaaaaggcccgaaggacaaaaataaaactatacctgatttcctgttaatcatcattcaaaatgttcacttcctggtgtggcgtatgtgaaggaacgaggaataaaatgccaacgggcaaaggagagttggaggtctgagcatagaaaagcaggagatcagtgggtattcctggcagggagagtgaacagaggggctggtcttgtttccaggcagtgctcagcgtccttggagaggggccaccgtgaagttagggtgagagcaggcaggatgagggcaaggctgttcctccccagccacctgcagctggaggactgagggatggagaaggtagtgtcagagctccgcggggatggagctttccaagggaaccacatgaagcagaatataaaaagagattcaattgtgtgcataaagtactgattctactgattgaccatgaaaggtgacctagaggtaaggtcaagatcagtggaagatggttgtatgaatggcgtgttggtccccaagagatgaatggatgttggcatcagatgggaagggggggtcccccggaaggcaggacgtgatgctccagatgggatgcttgaacggaggggatggtgtgatactctttttgtttgtttgtttgtttgttttgttttgaaagtctaagtttattatgggtcaacttgattcttttttattattattatactttaagttttaggatacatatgcacaacatgcaggtttgttacatatgtatacatgtgccatgttggtgtgctgcacccattaactcgtcatttagcattaagtatatctcctaatgctatccctcccccctccccccaccccacaacagtccctagtgtgtgatgttccccttcctgtgtccatgtgttctcattgttcaattcccacctatgagtgagaacatgtggtgtttggttttttgtccatgcgatagtttgctgagaatgatggtttccagcttcatccatgtccctacaaaggacatgaactcatcattttttatggctgcatagtattccatggtataaatgtgccacattttcttaatcagtctatcattgtttattggtaatgacaaggttgatgggaagtggaaggttaaggaagtttggacaggaaatttgggagagaggaaatcaatgtggagatagtgaaaagtggtgggaggatcacctgtgttagtgttcttccacctcagcatcatagaaaatttgggctggaatgttcttttatgcaggatggaggaggccgtcctgattttctagggtgtttgtcagcatccctgcctgctacccaggggatgtcaatagttctcttcagttgtgaccccaaatgtttatccaaacttgccaaatgtctcctatgggcaaaatacccctggttgggaaccacagattacaatacacataacattcacctgtaaattagcgggaagtaatattggtgaggatgacagttcacacccacagaggactaagatcacaaagagtaagggtttcgtgaggatctatgcaccaaccctgtctgtcattttctgtaattctgatccatgacatctgggaccttgctgactccacagggatgatcttgccaggtcttgcctattccgaaagacagcagtcagtttccttgagagggagcctttcacgtggaaatgaatccagagcccacaccccaaccagcttctatggagctgtcacactcagggccactgtgacctgccctgtcacccagggccataaccatggacagccatgggctctgcccagagccactgaaattattccaggtagtcaatcctgagcctgctcgttttgtctcccttgttttttccttcagaaaccataaggaaggctctttgcccacatgctcccccatgagcttctgcctcttgacagacactggggcttcccctgcggcccctcttggcctggtgtgccccctcctcttgtgaatgtcacaagctatttttgttttagtgacagtcatttcctactctttttttattttgttttgagatggagggagtctcgctctgtcgcccaggctggagtgcaatggcgcgatctcggctcgcaacctccgcctcctgagttcgaacaattctccttcctcagcctcccaaggagctgatattacaggcgccagccaccacactagctaatttttttgtatttttagtagagatagggtttcatcatgttggccaggctagtcttgaattcctgacctcaagcgatgtgcccgcctcagcctcccaaagtgcttggattacaggcgtgagtcactgcacctggccctcctgttctctttaattgttttgtgtgaaactttgtgatgcagggaattgcttcccgcaagaattcctaaattccattttgtgagagtccttcaaaacccagaggcattttctcatactacgtgtgtgtgtatgtgtgtgtgtgtgtgtgattgaaggggaattgggagatgactcttgagtctcaggtcatttacttgccccatatttaccttattgggaccctccctaaacccaaacacctaatctcaaggctacagcaaggcagcagccctgaaatctctcctctgggaggtaccagcacccggctgcttggatgctcagaggcaggatgggagcaggtgacgggggtgtgggcttgggaccagacagcctggagacctcccctctgtgagcccaccatcctcctttgtaaaatgcagacactcctaggacctcgctcacagccagggctgctggggatggctgtttatgttgtaccctgcactagggtcctgtccaaggcaaggggaaaaatgtgaaacccagcctgctctccgcagctgtgtccatgcagagctgagggattattttcaggcatcccactgatctatcccacttcccacagcccaccctgtacataggcacagccagtgtaatttgggaaaaactcattttaaacaaacaaaaaaatgtcccagccaatacaacatacccctttaaaaagtacattattgtgtttttcttttcatttgaagcaatgtctatgacattgcaacgtatatataacttaatatttaacattttaaccatatttaattgtacagttcccatattaggtgcattcacattgttttactatgatctccgttgttcatctccaatattcttttcatcttgaaaaactgaaactctgtacccacaaacaactccctacttctccctcacacctgtccctaacatccactttctttcttctttctttctctctctctccctttcttccttctttccttccttccttccttccttccttccttcctttctttccttctttcttttttttctgagatggagtctggctctgtcgcctaggctggagtgcagtgacacgatctctgctcactgcaacctccgcctcctgggttcaagtgattctctgcctcaacctcccgcgtagctgggattaaggctcccaccaccatgctcaactaatttttgtattttttttagtagagacaggatttcaccatgttgaccaggctggtctcaaactcctgacctcaggagatccacccgcttcggcctcccaaagtgctgggattacaggcatgagccactgcgcccagcccactttctactttctgctctattagttggacagcattagagacactaaattattggagtcatagggtacgtcttcttttgtgcctggcttgtttcactgagcataatgtctcagggttcatacagactgtagcatgtggcaggatttccttccttcgtaaggatgaataatatcccatggtattgatagaggatattgtgtttattcattcatactttgatggacctttgggttgcttctacttcttgctgtcgtgaatgctgctacgaacacgggtggacacatatctgctcgagttcctgctttcgattattctgggtctatatctcgaagtggtattgatgcatcatattgttagggaaacaggagcataggagaaccagggtgacaccgttttaaaatctgtccaaaaaaactagcaaggcacattccttgccagccctccaccatggccattaagatgtgtatagctgaggaaacagcttaatcaagcctgcaaggacaaactcctatgagagcaaaatgtctagataccccaatatggcattatatgcttttaagatgattacagttatgctttgatgcatttatgcaccaaaatgccaaggatagctttctttaaatcaacaaaataataaattttgtcatgctgccagcccacctgcacatacacataactttgcttagctattacatagataagacccccacataagtaaaacttaaaacaaagatgaggcattcctctcttggctttctgaggacaccctactctgtatctgagtcactttcagtaaatgatctcttcttactgcactctgcagctcacctgggagcccctcctgcaagagatccaaggaccctctcttcgggtctgaattgataactgttttctggcaacaatatggtaactctacttttatttgtccagaaactattgcactgttttacaaggcagctgcaccatgtgtccatcccactgtcgaaaaccaaaatttccaccagtttatttccactgtgatcagattcaggatcagctgctcgatgctcgaaagccaggcacgggagacaagggttggcagaaggaaagacaggttcaatcagagagccagaaaaccgagaaggtggtgaactagcgttctaaagcaccatcttcaattttagaattcaccatgggggtttcaaaaggaaatttgctgtgggagacatgcggagtgtgcagggtgcaggtctgtgcctttgttctggtggctatcatgggtatcacccaccctgagacctggctggcattatcctgacttcagaggaagagataaaggggtcagatgggagggaaaggaagtgggtgattaaaatatattttaaaaacggaggtccctggcctcacaatgattgaattggcatttgttagcgatttatggatcgggctgcatcccatctagaaatacaaaggcatttttgcccttatggcagaacagttggcgcacttttttgtcttttgtttttcttttgaaacggattctcactcggtcacccaagatggagcgcagtgctgtgatctcagctcactgcaacctctgcctcccgggttctagcaattctcctgcctcagcctcctgagtagctgggattacaggcgcccaccaccacgcccacctaattttttgtattttagttgagacggggtttcaccatgttgcccaggcttgtctcaaactcctgagctcaggcaatccacctgcctcggcctcccaaagtgctgggattacaggcgtgagccaccgcacccggccaacagttggcttttgtagggcttcttgagcaggaacaaagaaacagcaccatacaaaaaggcggctcttttaacgtctggttattttaggttactttccttttaagggttaaagcagagggacttccttctcttggcagctcacgttacttgggtcctttgagatcagatgctgtggatctcttgtgttttgaaaaaaccggcctgtttagggattttcctgtttttccaagtttcagtttgacgacatgcacttaacctgaaagactccatttttatttggtttgtgaagggctagagaaggagctccgtccacaacaacagtctcctatcaacttcatttaaccactaagtgcagaagggttccagtttccccaaagcctaccaccatcctttattttccattttatggagagtagccatgttaataatgtgtgctggttcttttttttcttttcagtggaaaaaatcatatttatttcatttttcaatagtaattatttattagtggtatgtgcgtgtctgttgggcactgcacaatttctcaaaccttgggatcagacgggaccatgccacctgactttcgaaaccttgctgattttcatgtggtaattgcccttcttcacagcaaccacggatgccccagcatcacaaagacatgatgtcagcaaaggaaatgtagagagaccgaatgtgaaatctgtgagccactggagctggtgtttcacatggtgtcagaggtggaatgctgctgtgcttcccctaattttaacatatccagggtccctctgtggacagctgaagctgtgaggatagaacagcaggaatgccgtaggaattagttggagggggcaggtaatggaagagctgatctggttgctaagcagctcagaatctctggagatgaatcataatggaattagagtaagagcagacagtgcagaaggggctactctgctccagccaaatgcagctgcagagaataagaaaagtgatgtggatgttccacagtctccccttttctttcctctcccctctcctcccctctcctcccctgccttcccttcccttcccctcctctcccctctcctcccctctcctcccctgccttcccttcccttcccttcctctcccctctcctcccctctcctcccctgccttcccttcccttcccttccctcccctcccctcccctccccttcccttcccttccttcttcctttcccttttcttttattttctttctttctattttttttttgagacagagtcttgctctgttgaccagtgcagtggcacaatcttagctcactgcgacctccgcctccaggctcaagtgattcttctgcctcagtctcctgagtagctgggactacaggcacccgccaccatgcccggctaatttttgtatttttagtagagacggggttttgccatattggccaggctggtctcaaactcctgacctcaaatgatccgcctgccttggcctcccaaagtgctgggataacaggcatgagccaccgcatccagccccaagtttcttaataagttctcatttgtttattctgatggtcttcatttgtaattgtatgtccattgcctgtatgtatatttggccagcaatcccctaatgcagttcaggatctgtgggaaaaatcaagacatttccagggggtccacaatttctagactatttttttaaagaacattaatattttatttgcttattttcttctctttttctctgcatgatgtgatattataatatttgaagtaagaagcagattggagaatccatttctcttccattaaggaggaaattaaaggagtttgcaaaaacttctaacaatatcacctttattactaagtttttgtttggaaaatataattattgttcacaaaatgtgagctatgttaatatacaatagatttgttgttgtcgttaagcttaaaaagtaacgtttgactatttataacatgatctatatgagatcatgttatgttttatttatatcttataccaagaaacatcctttgggagtttcccaataattttaagagggtaaaatagtttgagatgacaaactttgagaattactgtcctgggttaaattccttggttccgttttgctggattgaaagacacacacacttaatgtttctgagacatgatgccacattgctatgatgttccacagctgtttctctggctctattttctcacgggaaatgtaacccaggtctgtcggactcttaccaattttccagtctgcctcctctcataaattcagtgaaggaatttctttctctttctctttctttctttctttctttctttctttctttctttctttctttctttccttctttctttccttctttctttctttctttctttctttctttctttctttctttctttccttctttctttctgcctttctgcctttctttctttttctttcttttttctttctttctctttttccttccttccttccttccttctttctttccttctttgtttctttttctttttttttttcgtctttttcagaatctcgctctgtcgcccaggctggagtgcagtggcatgatctcggctcactgcaagctccgcctcccgggttcatgccattctcctgcctcagcctcccgagtagctgggactacaggcgcctaccaccacgtctggctaatttttgtatttttagtagagacggggtttcaccgtgttagccagggtggtctcaacctcctgacttcgtgatctgcgcgcctcagcttcccaaggtgctgggattacaggcatgagcctcgtgcctggcccagtgaaggaatttctatgggaagcgcacgtggcctccagttacatggatgttcagagatctcccctcatgtggggtatgattagatatctcagaagataatgttcaaggtatagtcttcagtttataaaccccagtcccgacatggggtgtcgtgggtgatcgtgggccagacatgtgccccttctgaacctcatttcctttacctgtaagtggaggatgggctgggtaaaaactcaacaaaatggccaacacattataggcatttaatacgttataactaggtttttctgaatttttacactaaataggaataagagttttaataattatgagcaaaagaggatgagaacaaacacagagtcggtgtctgtaaaatttctctcaataggccaggtgcggtggctcacacctgtaatcccagcgacttgggaggctgaggcaggagaatcactggaactcgagagaaggaggctgcagtgagccgaggtcatgccactgcactccagcctgggtaacagagagagattccgtctcaaagaaagaaaaaaaaaaaaggaatggatatagaagaaaaggaaaaaagaaaaaatatagaaggaaaagaacatagggaaactcataatttgggataataagcataataaagtcaaactcaggcagaagaatgtgattctaggagacagagagaggcaaattatttggcatgaggcctctgtgtttcccttaaatgagccgccccaggccctttgcacgtgttgctcctgccatcactgggtcttcatgtggtgccttcctgtctccattcaggactctgaccagaggtcacctctcagggatgccttctttgattcctgtccccagaagcttgtcatgcacctctaccttccaaccaccatggggttgattttttttatttcttccatatgtataaaaaaacaggatacatgtgcagaatgtgccagtttgttacataggtatccatgtgccatggtggtttgctgcacctattgacctgtcctctaaactccctcccctcaccgcctacccaccaacaggctctggtgtgtgttgttcccctctctgtgtccatgtgtgctcattgctgaactcccacttatgagtgagaatatgtggtgtttggttttctgttcctgtgttagtttgctgaggatgatggcttccagcttcatccatgtccctgcaaaggacatgatttcattcctttttttggctgcacagtagtccatgatgtatatgtaccacattttctttatctagtctatcattgatgggcatttgggttggttccatgcctttgctattgtaaatagtgctgtgataaacatacgtgtgcatgtgtctttatagcagaatgatttatattcctttgggtacatacccagtaatgggattgctgggtcaaatggtatttctggttctagatccttgaggaatcaccataccgaatcaccataccatcttccacaatggttgaactaatttacattcccaccaacagtgtaaaagcattcccatttctccacagcctcaccagcatctattgtttcctgactttttaataattgccattcatacagaatcaaagaagacttcgtatagccaagacaatcctaagcaaaaagaataaagctggaggcatcacgccacccgacttcaaactatactacaaggctacagtaaccaaagcagcatggtactggtaccaagacagatatatagaccaatggagcagaacagagacctcacaaataacactacacatctacaaccatctgatcttcgacaaacctaccaaaaacaagcaatggggaaaggacctcctattcagtaaatggtacttggaaaactggctagccatatgcagaaaactgaaactggatcccttccttacactttgtacaaaaattaattcaaggtggattaaagacttaattgtgaaactgaaaaccataaaaaccgtagaagaaaacctaggcaataccattcaggacataggcatggacaaagacttcatgacaaaaatgccaaaagcaatggcaacaaaggccaaaattgacaaatgggatctaattaaactaaagagcttctgcacagcaaaagaaactatcgtcagagtgaacaggcgacccacagaatgggaggaaatttttgcaagccaaagaaactatcatcagagtgaacaggcgacccacagaatgggaggaaatttttgcaagcaaaagaaaccatcgtcagagtgaacaggcgacccacagaatgggaggaaatttttgcaagcaaaagaaaccatcgtcagagtgaacaggcgacccacagaatgggaggaaatttttgcaagcaaaagaaaccatcgtcagagtgaacaggcgacccacagaatgggaggaaatttttgcaagcaaaagaaaccatcgtcagagtgaacaggcgacccacagaatgggagaaaatttttgcaagcaaaagaaactaccgtcagagtgaacaggcgacccacagaatgggaggaaatttttgcaagcaaaagaaactatcgtcagagtgaacaggcgacccacagaatgggaggaaatttttgcaagcaaaagaaactatcgtcagagtgaacaggcgacccacagaatgggagaaaatttttgcaagcaaaagaaactatcgtcagagtgaacaggcgacccacagaatgggaggaaatttttgcaagccaaagaaactatcatcagagtgaacaggcgacccacagaatgggaggaaatttttgcaagccaaagaaactatcgtcagagtgaacaggcgacccacagaatgggaggaaatttttgcaagccaaagaaactatcgtcagagtgaacaggcgacccacagaatgggaggaaatttttgcaagcaaaagaaaccatcgtcagagtgaacaggcgacccacagaatgggaggaaatttttgcaagccaaagaaaccatcgtcagagtgaacaggcgacccacagaatgggaggaaatttttgcaagccaaagaaaccatcgtcagagtgaacaggcgacccacagaatgggaggaaatttttgcaagccaaagaaactatcatcagagtgaacaggcgacccacagaatgggaggaaattttttgcaatctacccatctgacaaaggtctgatatctagaatttacaaggaacttaagcaaatttacaagaaaaaaaacaaacaaccccatcaaaaattgggcaaaggatatgaacagacacttctcaaaagaagacatgtacgcggccaacaaacatatgaaaaaaagctcaatatcactgatcatcagagaaatgcaaatcaaaaccacaatgagataccatctcacgccagtcagagaggctgacttttttggtttacttcctgttttgtaagatattgatcaataggatgctgtctgctacccagctgatgccttatattctccctctagtggaatataagctcctttgaggatggtagaaataatgaacccctggtttgcattactgattgtgccagaagattgctactgtgaatgaaaagctccgaaggacaaaaatagatccatacctgatttcctgctcattatcatgaaaaatattcatttctcaatgctgcttataccaaggaaataggaataaagtaacaatgcacacaaaagagttggaggtttgagtatagaaaagcagtcatgcagtagtactggacacaaagtgaatggagaagctggtcctatttccaggcagtgctcagtgtccttagggatgagtcaccacgaggttagagtgagaataggcagtggggcaggggctgttcctccccagccacgtgtacctgcaggagtgaggatgaggaatgacatggagggagtcatggctcatcagggttgagggtttccaagagaatcacatgaagcagagtatgaaaaggagatttgagtttgtgcagaagaaactggttctaacaattgaccatagacagtgatctgaaggtgggatgaagattagcgggaaatgggtgaatcaatactatgtttttcctaaagaaaaggaaaattggcatcaggtgagcagaagtcacctggaagataggcagtgatgttgcagatgggaggcttgagctgaggagatgggctgacagcctctattggtaacaacaaggctgatggcaatcgatggctaaaggagtttagataggaaatttgggagagaggagatcaattttcagatagtgaagtgttgggagggtcagctatgttagtgttcctccacatcagcactattgaaaatttgggcttgaaagttctttttttgcagggtggggaagcctgtcctgtttttgtaagatattgatcaataggatgctgtctgctacacagctgatgcctacagccctcctccagttgtgacagccaaacatgtttccaaaaattggcagatgtctcctcatggcaaaatcttccctggtggagaaccacagatattaacgtgtaggatattccccaggattatagaggaaagtgatgttggtgaggacaacagtccacatccacagagaattgagatcacacagaaatcggggcttttcatgaggctatgtgtcccaaccttgcatgttattttctgtaattctgatgggccacatcttggatcttgctgaccctggagggatgatcctgctgggtcttgtcaattcctgaagatagtaaacagctcccttgaaaggcagcctttcatgtggaaaccaatccagatcccactccccaatcatctcctctatggagcattcacactgacagccacgaatcactcagctctcctaatcaccccaggaccaggcatcagacagctcggggacaacccctatgcccagagccactgaaattcttcagagaagccaatcttgtttacctgctcatttacccccacttgttctttcccttggaaaccataattaaggctcttcactcacaagtccttccatccccttcctcttgccagatacttgtccttcctgtgtgactacctggtgtggtgtgcccctcctcttgggaatgtgagcaaacagctatatttgcagtaacaacttgtccctcagtctgttttaccgttgtgtgtgaaacttggtaatttctggtcttgattcatgcaattatgagcctcattttgtgggagtccctcgagtaccctgatgcatttccccatcgtgtgtgtgtgtgtgcgagcacgcacgtgtgtgtagttgaaggggagtttgggagacacggcattctcaagcaaattggagatgcagaccactttccctgcctcttatctatattattagaatcttgcccaaccctaaatgtccagtcccaaagatggagcaagacaggggccctggactccctcttctgggaggggccagggcacttttctttggatgctcagacgtgggatgggagcaggtgatggaggcgtgggctcagggccagagagcttggagacttccctctctgagcccagtattttccgccataaaatgcaggcacttgtaggtctcactcacaaccagggctgtggggatggccatgcgtatgttcctcagcattgaggcttctgtccaagaagctgaggggaggtgaaatctagcctgcactctttccaagttgtgcttagttcgaggataaataatcccaccagcgccactccctcattgatctctgcaaagccccttagcccaccaccgtggccttgggttcactcatgaaatttgagaaacaaattagttcaaggaacaagagagcaaataaatagtgacacagccattttcaggatctcatttttttcctgtttcttctcacatgaggcaatggtaatgctactgtaaagtgcctttgccatcactaggtggcactcttgaagcaatagaaagtatacagacgtttaacactttttatcttttcatttttaattgtggcaaaatacacagaacataaactttaccgtataatccattttttactaatattaattgaaaaacaaaggctggcaagtttaatttttttttttgagaccaagtctcgctttgttgcccaggctggagtgcagtggcgtgatctcggctcactgcaagctccacctcccgggttcaagtgattctcctgcctcagcctcctgagtagctgagattacaggcctgcactatcacacccggctaatttttgtatttttagtagagacggggttttaccatgttgaccaggctggtctcaaactgttgacctcaggtgatcacctgcctcagcctcccgaggtgctgaaattacagacgtgatccaccgcgcccatcctctaattttttttttttttttttttttttgagacggagtctcgctctgtcgctcaggctggagtgcagtggcaggatctcggctcactacaagctccgcctcccgagttcaccccattctcctgcctcagcctccacagtaccacagtagctgggactacaggcgcccaccatcatgcccggctaattttttgtgtttttagtagagacggggtttcaccgtgttagtcaggatggtctcgatctcctgacctcgtgatctgcccgcctccgcctcccaaagtgctgggattacaggcctgagccaccacgcccgacctaaaaatttttttaattgtaaaaaatgatgtaggccaggcacagtggctcacgcttgtaatcccagcactttgggaggctgaggtaggagcatcgtgtgagcccaggaattcgagaccaacctgggcaacaaggcaaaaccctgtcgctacaaaaaataaaaataaattagctgggcatggtggtgcaggcctgtaatcccagctactcaggaggctgaggtgggaggatggcctgaggtctgctgtgagctgtgatcgtgctgctgcactccaacctgggtgacagagcaagatcttttctttaaaaatggtgtaaattattacatagtttaacgttgatattttcatcatcttttaagtgtgcagtttgttggcttccattacattcgggttatttgcaaacatcactaccttccacgcccagaacagtcttcatcttgcaaaactggaattctgagctgattgtacatgagctctgcatttctcctctctaagcccccatgagccaccattctactttctgggtctatgaattaggctagtctggggcctgacctaagtggaatcatgcaacagtgtccctctggggctgacttattccactcggcatcatgtcctcagggttcctccgtgttgtagcatctgtctgggtttcctttctttgtaagactcagtaatattccattgtatgtgaacactacagcttgtttaccaatatccactcatcctttgatggacacttgcggttttccacctttgactattatgaataatgcatcgtgtcacatttccatcaacaaggcagaagtttcctacttttccaaagcctgccagcacttgttattttcaggctgggcgtggtggctcatgcctgtaatcccagaactttgggaggctgaggtgggcagataacctgaggtcaggagttcgagagcagcctggccaacatggtgaaaacatgtctctactaaaaatacaaaaattagccagaaatctcttgaaccctggaggtggaggttgcagtgagccgagatcatgccactgcactccagcctgggcaacagagtgagactccgtctccaaacaaacaaacaaaaaaccacttgttattttctgttttatggatcatagcaatgttaataaatgtgtggtggtttcttctttctcttaaaaataatttttcttttcaaacaaaaactattttatttagaaaagccatgttgaatcatggcccagcttggaaagttatttatttattaaaattaattaatttttattaaaacttttttaaaatgtagatacaggcttgttacaaggacatcttgcctgatgtggagtttggcttctaatggccccgtggcccgcgtagtgaacgtggcgtgagacaggcggtaccttcccttctgctgttgacagtgtctactgttctcatatccttgtgcctgtgtacccaatgacaggcggtaccttcccttccggtgttgacagtgtctactgttctcatatccgtgtgcctgtgtacccaatgtttaactcccacttataatggagaatgcatggtaaaaatcattctttattcttcaatcatggcaagtccttcatcatgggacgcacgtgcctgttggggactgcaaacctcttatcccttggcatcagcctggactgcaccactctcatttccttatctatgttaatttttgggtggtgattgcttctcttcacagcagccactgacacccccgcatcacagagatgtgatgtcagcaaaggaaatgttgaaactgtgaacccctggagctggcaggttctgtggtgtcagatttcgaatacagctgtatccgatgccttcaatgttaaggtacctaggatctctctgcagagatcgtcacagcggtgaggatagaacagcaggaatgcagtcggtgttcactgcaggggagagagtggaggagctggcctgattggcaggcaatgctcagtgtccttgttggagagagtcaccatggaaacagagtggaaacaggcagtgggggaggggctgttcctccccagccaaatgcagctgcagagaagaaggaaagtgatgtggggccggtgcagtggctcaggcctgtaatcccagcactttgggaggctgaggcaggtggatcacttgaagtcaagagttcgagaccagcctggccaacatggtgaaaccccgtctctactaaaagtacaaaattatacaaaatacaaaaatacaaaaaatacaaaaattagctgggcatggtgatgcacacctgtaatcccagctacttggaggctgaggcaggagaatcacttgaacccgagaggtggaggttgcagtgagccaagatagtgccattgcactccagcctgggtaattcaaagtgaaactccatctcaaaaaaaaaaaaaaaaaagagaaagaaagaaaaaaaggaaagtgatgtgaatgtcctgtagtttctttcatggataacctctcatttgtatgttcagatgatcttataatttcatatccactatttgaatatatcttacatcaatgttgtcccaaaaggtagttcaaggaccttgtgaaaatcaagaccatttgaaagagttcacaagttctatatgttcttaagaacactgttttatttgcctttttccttcccattttctcttcacgatgtaatattgtatgtttgaattaattagctgaaatgagaattcggctgctttgtattaagaaaagatttctttttgtagagacaaagtcttgcctttgtcgcccaggctagagtacagtggtgcaatcatagctcactgaaacttcaaactccttggctcaaggaattctcccaccatagcttccagagtagctaggactacaggcacatgccattcaactggactaattaaaaaaaaattttttttttttgtagagggggagtctcactatgatgaccacgctggtcttgaactcctggcctcaagcagtccttctgccttggcctcccagcatgctttgatgacaggcatgaaccatagcacctggttattaagaagagtattggctgggaggagtggctcatgcctgtaatcccagcactttggaaggccaaggcgggtggatcacaaggtcaagagatcaagaccatcctggccaacatggtgaaactccgtctctactaaaattacaaaaattagctggatgtggtcacgcacacctgtaatcccagctacttgggaggctgaggcaggaaaattgcttgaacctgggaggcggaggttgcagtgagccaagatcacgccactgccctccagcctgggtaacagagtgagactctgtctcaaaaaaaaaaaaaaaaaaaaaaaaagaagagtattaaagggatttataaaaaagtgaaacagtgctccctttataactaattttttgtttggaaaaagtaattattgttgataaaatgtgggttctgttaatatgtgatagggttgttacttttttatgttttaaatttaaaaatttctcagcttcaatttataatatggtaaatactcctagatataaaccatgcaaagaaaaattctttagagattctcaattatcttgacaagtatacgggccttctgacttttaaaagtttgagaaatactattttaggctaaatttctaggtataattttgtggggttgaagaagacacatgcttaatgtgtctgatccacgatgccctatactttcagagtaagtgaaagaaagtatagagctgttttctggctctgaaagtatagagctgttttctggctctaaattctcatgggagtgtgatttatatgtgtcaggcttattgatttgccaagccgcctaccattataaacccagtggggagatttctccaggaagtatgctctgactcctattacccaggctttcagagatctctcatataagtttagaattcccagaagagaaggtagaatgtatattctcaagtttataaatcccaggctaacattcattactgggtgatcatgggccagacacctgcctcttttgagcctcgctgcctttgcctgtaaatgaggattgggggtgtataaggatttggcacaatgcccaatacattgtacaaattcaataaataatagttgtacattttgcatttctaccataaataagaaatacagtagtaatttaatgatgtgagcaaatgatagttagaaagaatagagaggcattttctttgtgaaagtttctccaacgactgtatccacaatggttaaagctcttctctccccaattctggtatgataggtgtgccacttctcctgttccttgtctctcttggtgatataactgtttacccatttccttcactgggccatgaactcttagtgttcgggtcgtgtctctaaaacctgtatcaatagcactttgaacttaaaaagcaggtaaatagtttcctggcttagcccttgatttaagaatcaggacagaggccaggcgcggtggctcacggctataatatcggcactttgagaggccgaggcaagcggatcacgaggtcaagagatggagactagcctggccaacatggtgaaaccccgtctctactaaaaataacaaataccgggcatggtggcacacacctgcaatcccagctactcgggaggctgaggcaggagaatcacttgaacccgggaggcggaggttgcagtgagccaagatcgtgccactgcactccagccttgatgacagagtgagactccatctcaaaaaaaaaaaaaaaaaaaaaaagaaaaagaaaaaagaaaagaaagaatcagaacagtaccatcaatgactaaaagctatccttggggctgaaggacaatgagactatggactcattgataagggaagtagttgatgctaaccaacttattcaaaggtgacctcaaagtatatttgtgggataaattgaaaatttattattttacaaataagaagacagggccccaattgggtcttctgcctacagctccacataaagactggttatgtgtttatttcattattcaacagtcaccagcacatgccatgtgttaggcacagtgctagggacagagggaagagtagtgcatatatgataccagcattcaaattcttcacagtctgtgggttcactgaaggtcctacgtaaccattccaatgtttgtattcttgtttctctaataatctagagcaatacccgtacatgaaatatgttgactggttaataagtaggctttctggagaacctgaaaaaaaaaatcaaactatagtccggcgtggtggctcatgcctgtaatcccagcactttgagaggtcaggagttcaagaccaacctggccaacacagtgaaaccccatctctactaaaaatacaaaaataaaataaaatacaccaggcatagtggcacaggcttgtagtccaagctactcaggaggctgaggcaggaggatctcttgaatccagggggcggaggtcacggtaagccaagatgacacgactgcactccagcctgggtgatagggtgagactccatcttaaaaaaaaaaaatcaaactgtattgaaggatgagtaagaagaaagaggaaaggggaaaatgaaggagaaagggggaaaatgaaagagaaagagagaaaataggtagtttgcgatatggaaggatgaagagaaagcagagagggaagagagagcattcagaccaaaggagattctaagggagaaatagaggcaaaatgtttagctccagccacatggttatatcttataccctggaattaatcagcctcaggaccttttcatgtgcagctctttccatcaccctaggtcttaatgttgcctttctctgactccagttaaggttctgataaaagttaaccacccaagaaagccccccctatatttctatttccttaatagaaagcagccgaattctcatttcagctaattaattcaaacatacaatattacatctatttccttctttctttctttccttcctttcttcattccttccttccttcctttctttctttctttctctctctctctttctttctttctcttttttttttcggagtcttgctctgtcaccaggctggagtgcagtggtgcaatctcagctcactgcaacctccacctcctgggttcaagtgattctcctgcctcagcctcctgagtagctgggattacaggcgcgcaccaccacgcccggctaacttttttttgtattttagtagagacagggtttcaccatgttggccaggctggtctcgaactcctgaccttgtgatccacccgcctcagcctcccaaagtgctgggattacagacgtgagccaccgcgcccggctgcagatgcttcttttatttgcttgcttttcactgctttcgatccactggaatgtaaactccatggataatgtttgaaaatgaacctagcgttgtgagtttctgctagtttcaggtttgttactgggaatagaataagtccaatgagcaacaatagtaactatatctcattttcttttgagacatcatgaaaatattcactctgtgatgctacttgtatttgggaaatataaatcaagtgaaaatggggatgacaggcttggaagtttaaggatagaaaagctggcatgcagcaagcattcatcggagggggattgaatggagaaagtggtcttgtgttcaggacgccctcggccttcttgacagcgagtctccatgaaagcagagtgagaacaggcggtggccgagggtctgttgctcctcagctatgtccagctgcatgagtgaaggacagagcaggcagattcatagtccagcaagcatttatttttctaagagactaacaaaaagtagaatatgaaaaattgcttcatatgtgtgcataaaaattttgttttaaacagagatcatagaaggtgaccttgaggtgaaagttaagatcaatgaaaaatgggcaagtcaatggagcattggtccctaatgaatgaagtgatgttggcatcttgtgacaagttacctgaaatgtaggaagtaatgttggagatggggtgctttaggtaaatggatggaggggtttgggttattggtaatgagaaggctaatgggaatggattgctaagaggcattggacagaagcactgaagaagaggaagtcaatatattgatagtcaagaggttgggagaaccatccatattaggtattatctaccttagcaacgtagaaaatttgagctggataattctttatgtcaggggggttctgttctgacattatagaatgaggaacagcatccctgactactatccaccaaaaagctcactcgtcataatcaattgggttattccagggatgcaaggatgtttcatcatatgtaagtcaataaatgtgatacatcatatcaatagaatgaaggacaaaaatcatataataatttcagcagacacaaaaaaagcatttcacaaaatttaatatcctttcagagtaaaaattctcagcaaactaggtgtggacagaatgtactcaatataataaagaccatatatggcaaacccacagctaatgtcatgcttaatgagaaaatgttgaaagccttttctctaagatctgggacaagaacaagtatgcctattcccaccacttctattgagtatagtactgcacattctatccagagtaattaggcaagagaaagaaatgaaggcatccaagttggaaagaaagaagttaaattgtacctgtttagagtgacttgaccttacatatagaaaatcttaaaggttccattaaaaagtgttataactaataaacaaattcagtaaagttgtaagatacaaaatcaacatgtaaaaagtagtagcatctcgatacactaatggcaaaatatctgaaaaggaaattaagaaagcagtttcatttacaataagcttcaataaaataaaattcttaggaatgaattaaacctagatggtgaaagatcactacactgaaaactatacaaccctgaggaaagaaattgaagaagatacaagtaaatggaaaaatatcttgtgtttatagatcagaataatgaatatagtgttaaaatgtccatactacgcaaagtggttcaatgcaacctctctaaaatcacaaatggcattcttcatagaaatagaaaacaatcctgaaattcatatgaaaccataaaagacccagagtagccaaagcaatcttaagcaaaaagaataaagctggaggtcttacactacctgacttcaaaatataccacaaagctataggaactaaaacagggtgattctgtcataaaaacacacacatagaccactgtaacagaataaaaatcccagaaataaatccacacattcacagccaactgttttttacttttgacaaagataccaagaacacataataaggaaaggacaatctcttcaacatattgtgttgggaaaactggatatctatatgcaaaggaatgaagttagacccttatctcaccttacatacaaacatcaactcaaaatgaattaaagacatagagggaagcctcaaaactataaaactaatagacgaatacataagggaatatccccatgaaatataaaggaaaagtcattcacctgggcaatgactttttggatataacctcaaaagtactggcaagaaaagcaaaaatagccaaatgggattgcatcaaactaaaatgatactgcacagcaacgaaaacaatcaacagagtgaagagacactgcacaatgagagaaaatatttgcaaactatatatatctgatgaggggccaactcacactcacactcctcatccacgctgatttcaggtggtgatcttttctcttcacagcaaccactgccaatccagtatcacaaaggtaggatgttagcaaaagtaatgtagagagagctaatgttgagtctgtgaattgctggagctggtagttcatggtgtgtcagatgtggaacattgctgttcttcccttaagtttaaagcatggggataccccagcagacagttgcagctgtgaggacagaaaagcaggaatgcagtaggttttcactgcagtcggagagaatgaaggagcgggtcctgtttccaggcagctgtcagcatccttggagatgagttgccatgagataagagtgaaaacaggcagtgggagaggagctttttctccccagccacgtgcagccacaggagtgaggggcagagcagaaaagggtcagagtccagcagcgatgggatattccacaagaattgcatgaagaatataaaaaagagatttgcatgtgtgcagaaggaattgattctgaggattagccatggaaggtggccgggtgtaaaggtgaatctcagtgtaaaatggtagaattcctggagcgctggtcaccaaggaacggggggacattggtgtcaggtggggaaggggtcgcctggaagtcagggagctgatgtaggagatgggatgctgatctgatgggataaagtgattttggttattggtaatgagaagttcaatgggagtggaaggctgagggaggattggagaagaggtcaatatatggatcgtcgagagggtttggaggatcattataatgggttttccaccttggtggtgtggaatatttggattggataacgtgtcgtgtggggacagggacttcctgtgcattggaggatgttgaactgtattcctggcttcacaggaccctttcagaggtgaaaattaaaaatgtctctagatattgacaagtgtccccagtgggcaaaatcaccctggcttggaactactgatctaagtgggttataatagtcaaccacagtgtggatcgaagtattttggggtcgtcactccacatccacagagaactcagaacaacaggaagtggggagttccctgaggatgcgggcaccaaaccatctttaacttcctgtattctgatgctttgacatctgggactggctgaccctggagacatttcccctctcagctgtcttcaaccgctggagatagtcacaactttcctgcaagtgtgcctttcatgggtaaaccaaccagtcctagcttacacccccagccacaccttatggagctctgagccacaatccacgtgcacagtcacccaaggtcaggtatcagaaacaacgaaggacgtcccataacccacagctactaaaatgacctaaatgagcctgtcgtcagcctgcttatcctgcatgacctgtttcttccaaagggaacttcagtggctttgtccacatttcctcctgcatctctctgggtttttgctgaccaggtgattccccgtgtagctcccctggctgtgctgtgccctcgacttgtgattatgagcaacaaactttccttttaatggcaggtatctcctgatctgtttaactcctgtgtgtgaaactttgtgattcatgcaatgagaacaaggctttacgtgaacagaccagagcccaggtgcagggcggtcattccagagcccaggtgcagcaggtgcagggcggtcattctgcccacacaggtatgtgttgggggagggcaagttgaaacagagcctgagagatgaattcattaatgaacaaatttgagccccaagccacatttcctcctttacagccaccttggtaggaccctacccaagccccaaatgccaagccagaatgcagagcaagacagcagccctcaaatcccccctctgggaggtgccaggactcccctccttggatgctcagagacaggatgggagcaggtgacggaggcgtgggttcagggccaggcagcctggagacctcccctccctgcgcccagtgccctgctctgtaaaatgcagacactcctaagacctcacgcacagccagggccgctggggatggccgtgcgtattctaccccgcacttaggctcctgtctgaggagatgagaggatgtgaaatgcagcctgcactctctccacagctgtgtccatgccagggctcaagatcccacacctcagcctagcattgctctgtccaaaggcagacagcctggtacagccatgtgtgcagttattttcacttcaaaaaaaaccttattaaacaaaaaccaaatatatgtaaacacaccagttttttaagtatctcatttttttttctaatttgaggcaatgcctattgtcaagtatctttgctgtcattagacggaactcttgaagaatggaaaagtaaataggtattctttcttaatatttagttgtagcaagatacacataatacaaaatttgcagccacacacggtggctcatgcctgtaatcccagcactttgcgaggccgaagtgggaggatcacctgaagtcaggagttcaagagcagcctggccaacatggtgaaacttcatctctactgaaaatagaaaaaaattagccaggctaatttgattcatgtctggctcccccactcaactgacagcaggccccaggacagccagtggctgtgtcatcatgatctgctttgccctcactgtcctctcttacatccgcatcttggccacagtggttcagatccgttcagcagccagccgccggaaggccttctccacctgttcttcccacctgggcatggtgctcctgttctatggcaccggcagctccacctacatgcgacccaccacccgctactccccgctggaagggcgcttggctgctgtcttctactccatcctcatacccaccctgaatccgctcatctacagcctgaggaaccaggacatgaagagagccctgtggaagctctatctccaggtgccatactagggtctgccatctggatgcgggagggacccaaaaatccaccttcccaagattttccttgtggtcgtggtggaagtgttagtgcctccagagacccccaggaacacacctattcgccaaagttgtcaacaaagttgaattgcaatgaatcatgcaggagaaccctgatggatgtctggataaaatggagacaaatccaatgtgcatttaatttaggcaaatagtattaaatgtacacaggggaggagagaaagaggaggagcaaataatttaaatagggtgggtgattccacccaagagctcactcaataaatttatgacctggactacgaatccaataggagactgtcctctcagcctgcctcggtttccatgcacttccccatgtggacatgttttatcctgctcaatgtggttctaatgtttagtggtacacattttttcatctagtgtttgtcctaaatgcaagccaaagccttcatcacaagcagcagcatctattccagaagaaaaataggccatattggacgtgcagagaaatggttggtagtcttcacgcggctgcttcctaagggaaagtcaagggtacctttatctttctgcaatgtttctctgatagcaaaccctgtatttgttgtatttctggttcagctgctttaacagaaacaaaataacagcaacctaagtcatacagaaggcttgtttctcttttgtgtaatcatttgtgcttggaggtgaccctgggtgtctctatgccacagtcatcctgaggccaggttccttctatctcgttgctctaccatccctgaaggtttccttattcctatggtgggagttggatcactagcacctcattcacaatccagctgctggaagagggacagaggaaatggagggcaagctacatggttttaagatgtgacccagaagttatacgcttcacttctgctaacatcttattggctggtgtttagccacatggtcacactgaccgcaaaggaggctgggaaatgttgtctccagctgagagcccagataaaactcatgaaaggagagaatgttatttactaatttgtaatcagtccctcacatctgatctcttgatgagccaccatttatcttcttactcaatcctaccattatgcttccaatggccacctgtactaatgtttagtggcactaaaactttacatacattgtcacttttatgtacattatctctaatattcaaaacacctctgtgaggtagttgtaattttcctcattttttagataagcaaaataaaattctgataagttaggcagtttacccggagttaagaaggttgagaaaggcttgatatttttagattgatatttttaggtttgatatttcagaatcactcaggattctttttttttttttttgagatagggtcttgctctattgcccagacatgagtacagtggcatgatcatagctcactgtagcctcaacctcctgggctcaagtgatcctccaacctcagcctcccaaatagctgggactacaggcatgcaccaccacaccctgctaacatttaattttttttttttttttttttttttgtagagatgggagtctcattatgttgcctaggctggtcttgaactcctgggctcaagcgatcctcccacctaggccttccaaagcgctgggattacaggcatgagctaccatgcccagcctctacttcttttaatgatagagattgaattatatgtgtctagggctttaaaaaatcttaccttacagaggcatttctcagaagttttaggagtccgttgcagtcctaccaacatatccctgaggattgaacaattctgctctacctgggaccaccctttgatcaaagacataacccttaggggagacataaattggccaaagagagagaaaatgggtaggtgaccagccagcttgatcaagtctctggtgactactggggcatggcagatgcacacaaaggtgaccaccaattagtcactttcttgtataaacccttccccttgagtgtggtaggaacctgggatttgccttcagccaatagaatatggcaaaggtaagggttggtcacttccacagttatctgagagctcctctctgaggtgaaaaacacctcattctgttttactatctccattacatttaccacccttatgaaattatataaattattgagtgtgtttgttctaccccaaccaccccattcctctgaatataatatccatgaaggcacggtcttgttttcttcaatgccgtatcccctgtgcatagcgtagtacctgacacatattaggtgttaaatatgtatttttatgaagaaataaatgtgaagcagaacaacaaaaaacaaaaaccagagctgttcttgtgtaaacgagggtgagagggctgggatccttgtctatttggtgttttcccaacccctcagcacagtcatttctgcaacacctacatgggatctttgagctccacaaacctggttgagacacctcttctctaatcagattaatacatgctattgaatagaaaccaccattgattgtaagatactccactatcttgcattccattaagaaagaaaaagacactgccaatcaaattgtgacactccatcaataaaacatcttgattttccatgctaaaatgtgctcctcagccttcagatcacagctgaaatgtcacttcctgatcacccctgctggccaacctgtgtcatttctccttctatactctcagcgaacacacactgcaattttaattaattatgtaattatttgtttaaaatgtcttctgaagcaaaaatgaaaacagaatgaaggttagaattatgtctgcttgcatactattatccagtggtatgttgataaacttgctctctcaaaaaaaattataaatagcatttgacagtttctatggtgtaaatattctcaccacagctgatgtcaagctatcaatagttcaacaacttatttccaacattcctgaatatttataattggctcttgtgagctgacatcagcttgctccagcacagttcacccaggaccaaacactgtatctgtacataataatggcttaataaatgattggttagtgaatgaataaatggttgtgagtcacactgaatgaatatgtagcaggtatttcaaagttaacagttcaaaatacagccctttatgtctccttcatacctgtggtttttccgttttcacctcagttagcagcactgacatctgctggtcactcagggcaaaaatctctaggcatattgatttctctctctccctcacctcttcccagcactcttctcattatatccatgagtcctgtcaattctatcctcaatgtgtattctattctattccaaacccatccctcacaccatccccatggccaccatgctaacccagcacatcatggcctggccacaacagcctcctgcctggattccctcccttcagtcttacctttcaaagctcatcctccctccaccttaactccccacaccctgcctatgcgaaagccacagggtgttgctgaaaagataagtcaggtcccatcatcctcccgctgcggccctccaggtcctccacgatcggaccccacccagctctgcagcctcctctatcacgctctctcctgcagcttttattcccagctatgctggccttagctcagttcttcaagcaaaccattcttctccctacctcggggctctgcacttgctcttccgtcagctgaaatacccttccccaaatctgagcatcaccgcctctgcatatctgagcttcattctagacgtcgtctctttggaaagacctctcctaaccacttctttaagtggcatcatcccctccccctctcgcacatccccccgttttattgctttctgagcccttatcactgttggaaatcaccgtgttgcataactttgcagagcctgagacaaggacttgggaagggtggtttatgcctgggaaaaggcaggccgggtgccgggatgtagtgcgcctgcacgccgtctccagactacaactcccagaatgcgcggcgccccgagcgtatttccgcttccggtggcgttttagcgggagatccgagcgtctcggctggtggaaggggcgaggagctttgcagttgtgtgcgagtgtgtacaggtgagtttgtccgtacgcgtgattaagtgtgtgcgtgtgatcaagtgtgggggcgagtgttgcgtgagcaaacctgtgagagggtgagagtccgtccgtgtaggtgagggagctagcaagagtgtgagcgagtgcgaatgtccctacaagtgtgggcgcgtgatgtgtttgaaggtgtgtttgttcgagagggtgtgtgttggggtcaacgagggtgcatgtgtgtgagtgaggaagcctgagtgtgtggtgtgtgcgcgagccagcaagctggaatggctctcgcgtgcttgtagatcatgagcgtgacttggtggctttctgtgatggtattgggtgtgtatggctttttgctgtccatgcatgattgtgttagcttgactcgtgttggtgttgtttatgtgggaatgtgagggatttagttcatgagattacgtgtgtgttgctctgcagtctcaagcttgctgggttagctgtttctgaataggatttgacccaagttcagcgtcagcttttcaaacagcctaaaaactctggccttgggcattgagaaatcagaaagtttttttttctctctgtccctctgactataacagttgtggaagaattagacaattctaagaaagaaagtttcctgaattagcattaggaaaactagacacaaaaatcccactttctgaaaaaatgagaaacttcctaattgtaactaaaatgatcagtaaacaagccacttgctggtttggaagaaaggaaacacacctatgtgttctctttctgccaacacttgaattctctggtccaactgttacgccgtctacgtgacttccattaagaacaagcagcacccttaaatgcatctcaagtgttgtatgtcgctaaaggccatgaccggttcttggttttccttatctccaagctaagcctcagtttctgcatgcacaaaattaggaagataatatccacccatctacaactcaatgcattgagtcacatgaaagttttgtagacaggaaaagttctgtggcactcggcctgatcaagtcagctttcctgggtgttgctgagttaactataaggattatatggaaggaccatccctagactaattctagacctggctcctaatgtgcaggtcagcagttctttccgtgactggcaagtctgaggtcatttgcaagttaaggaagataaatgtactgatatctgacttggtttgcgccagagatgattttttcaaaagatgtattaactgggttggatgcagtggctcacccctgtaataccaacactttgggaggctaaagcaggaggatcgcttgaccctggagttcaagaccagattgggcaacatatcaagaccctatctctacaaaaataaaaaataaataaaaaattagctgggcatggtggcacttgcctgtagtcctagctgcttgagaagatgaagtgtgaggattgcttgggcccaggagctggagggtgcagtgagatgtgatcacatcactgcactccagcctgggcaaccgagcaagaacctggctcttaaaacaaaaatttattaactggaaaattaggcttcttcaacagttatttcaaacttaagagccggatgcccccacataatattaaagctgattttcaaggatctcttttctcaatgtaagaatgagtcccaaaagtgagaaaagatctgtgaaggctgtggtggagcagtgaaaagcattgtaattttcttgactctttggtccaaacatacaggagggacttctttccagtaaacaggagtgaggaaaagacaaggaatttaaatatatctatgtatgatctgcaaaatacacgagctgtggcgtataagttagaaagatccagccatctttcatggtttgcagcagtagatggacacagctttgcagaattgcagaacttgggtgattgagatacctaaacctggagttttgaatcccagctttgtcattactagttgtgtggccttaaacaagtcacatcacctccctgtgccttagtgtctctgtatgtaagatggggtgttgttacccatctcacagtaatggtgtgagtgaccgatgtgaatctcccagcatccagaaaggccctccagtctaggaggggccctgagactatcaacagtagccagttaggacaaaccaaactgaaaatagcaattatcaagcctctattcactgacttcaatagcataaacagaggccaaaaagaaaaaagtgccagcttctctgttctttttcccacgtagcagcaccgggcgagggtcagatgaatctatacaggaggtagggctcatctccctgccagggaaccctgaacaaagggccccagatcagacttctcaagtcgggatgattttacctcccagataaaatgtcgaatgacatttttgcttgtcacaattggagaagcgggtgctcctggcatccactgaacagaggccagggatactactaaacaccctacaatgcactggatggtccacaggagttgcccaacaccaaatgtcaactgcaccagtggagaaatcagtcctggtgctgctcccacatctgatcctatcactctccctctcactcgcaacccttctactgtctcctccaccaacatacaaagctattttctgaccaaagagcttcgctcatgctgtttcctctgcccggacactctcttctccagggtcccaggctgacttctcatctgatggtctttgcttaaaggccatctcttcagagagccttttttggaccaacctgtcttaaattagccctcccacttccatggtaactctctaccctctttcctggttttatttttcttcatagcatttaccaccttattttgcttattgcctgtctcccccatattgcacattaaagtttgagaaatactggtttcaagaaaggattgaaaactgaggatcctacaggggccagcagagatgatcttgggtgactttatttttttattttattttattttattttttattttttttaattttatttatttatttttttttgagacggagtctcgctctgtcgcccaggcgggactgcggactgcagtggcgcaatctcggctcactgcaagctccgcttcccgggttcacgccattctcctgcctcagcctcccgagtagctgggactacaggcgcccgccaccgcgcccggctaattttttttgtatttttagtagagacggggtttcaccttgttagccaggatggtctcgatctgctgacctcatgatccacccgcctcggcctcccaaagtgctgggattacaggcgtgagccaccgcgcccggcctgggtgactttaataaagcagccaaatgtagttagtctggttctaaaatttcagaattccttggcaatgccgaagtgaccctattcttgagatgctggctttttagaagaaatataagaaaaactctatagaagaaaactcacaactgcaaaaacatgcagaaataactaaggaaaacttgtgacattttgataagaaaactataaagctttactgattgatacaaaagcttgaatgaatgaaaacacagtatcatattcctggatgttaagattaaatgtaacaatgttaatccttcctaacttataagttcattgcaataataatcagaaggttggtttttgattactaaagataaattttaatctggaataacggaaacttatatataacttcacataaatttatgcatacatgtacatatactttttaaaggcacaatgatggaaaacattaaatatagccataaaaattaagaagaatatagatctaggataaaacagggcaacaagccaataaaagcaagtagatggtccaaatatagaacctacattataaaatataacaatttataatttactaataatgttggggcaattaacaatgaggaagaataaatttaattctcttttcatacaatatgcccaagtaaattcaataatcactaaagcatatttttaaaactccagaataaaacactaatgtttacagagggttagattttgtagggttggaagaaaatagaaggattgaaatatataaaaattgaaacattttcaaaaaataaagaaaataccaaagagggaaaatcatttgcagccaagatgacaacaaagaattaatatctttattatgcaaagagatggttcaaactgataggaagctattaaagtcacatagacaaatgattaaaagacagacaatgtgaagagaggaaacaatggcttaagaagcttacaggagaaagttcaacatccttaaaaatcaaagacaattaaaatgagatgccctttcccctattagcaaagttgctactaaacaccctacaatgaaaagtgctgttattacataatgccagctgggcgggaggtgtggggggtagtgggtgtgtgtgaggaacacgtatccccaagcattactagcagtagcagcagtgcaaactgatgtaatgtttccaaaaggaacttggatatatcaaaaatcttaaaagcaattatacaccttctgatgcagcaattcctctttggcaaatatgtatcgtaaagaaattttacatttggaaaaaggtttaagcaccgaaatgttgattatagtatgttcataactatgaaaaattgaaactgaattttacctcctaacaacagaggaggagccatccacagaaagcactgggtttgctgtgccactggtaaggcggtgataaccacagacgagtgagtgatgacagcagttttgtaaggtataagattgggtagaaaaacaaggtatactatcgcacacatggaatagtcacagctatatgacaactatctataaataccttaaaaataggtaatacagggttgggtgcggtggctcacacctgtaatcctagcactttgggaggccaaggcaggcagatcacctgaggttaggagttccagaccagcctggccaacatggcaaaaccccatctctactaaaaatagaaaaaaaaaaaagccgggcagggtggtgcatgcctgtagtcccagctacttgggaggctgaggcaggagaactgcttgaacctggaaggcagaggctgcagtgagccacgatcgcgcccctgcactgcagcctgggcaacagagcgtaatacagtcatgagggtaacaaagtggacaggtatagaccatgaaaatgagatctttacttcagccactccccagaggcgactaccttcataaatctagtcattaattttaagttacaagaaaacagactaaaaatgttagtggtgttcatagtgtatttttctgtttcggggcagagggagggagagagatctacatttctgtaaagtagttgcctttaatgagtcaaatattgctttaaaaagaaaaataaacattaatccatcagaaatgtgtacttaaaaggaaactgagttcacacaaattagtaagaaaaagcataaagacaaaaaagctaaagaggtaaagggcctaggttatacataaagaagtttttaaaacttatttggaaaaaatgcataataataatgcaaaaatggattaattattgttaataataatctttttattaccaaataggtgaagatttttatctttttattaccaaaaagatttatctttttattaccaaataggtgaagatttttatttatctttttattaccaaaaagatttatctttttattaccaaataggtgaagattttttggttgttaagtgaataaatacccagtgcaggcaaagttatttaaagggagtatttatttggtaccagggtgacaaaggcagttctttgcacatacaaaaactgcttagtgtgtcttgtttgccttgggtgctgtgctgagaaagatccaaccctgtcctcaggttcactggaaccagagagtgcataactggttaacaacgcctgccagggactcgagagggaggattgtaagtttaccacctatttcatacctctggccctccctatgctgagggctacaaatggcagagcccctccacaaacaaatccagcaggatctttcgagagccttagaaatgttcatcacatgtcatctagtgaaaccactttttggaaatcgattctaaactgtaaatacagtaatttatgctttgttaatcagacttttatataaattaaaaattgtcacaaaatcagaaaagaactttaaacttgtaatattatttttaaaaacctacacatagaaaaaaatatttgtagaaaaaatactaaaatatgataaaatgtggttgcgttttgatgtgttaactatggtttacaactctagtttattgctgctaataaaacattttaaaaaataaattttaggccgggtgcagtggctcacgcctgtaatcccagcactttgggaggctgaggtgggcacatcacgaggtcaggagtttgagaccagcctgaccaacatgaggaaaccctgtctctactaaaaatacaaaaattagctgagtgtgatggcacgcacctataatcccagctactcaggaggctgaggcaggagaatcgcttgaacccgggaggcagaggttgcagtgagccgagatcataccactgcactccagcctgggtgacagagcgagactccatctcaaaaaaaaaaaataataataaaataaaatttaaaatactccctaattgcaactacttgttactgagtgccttctaaataccaggcactattaggctcttttctatagatgaactctagaccttttaatggttctcccaggggaggatccccatttcctaagaaaacgaggtataatcagcctctaaggaggaccttgaaatttgacctcagctctccctggctccaaagcccaccctctctcttctctgccaagggtctcttctacttgtgaatataactacctccctggacttgtactagttgcatacctagaactattaggaagtttattagccttctctgttttgcaaaattttctttaatatgctcaatattatttgtatagtgaggaaacaatacctaataaaactatgttaaaaatcatagttcaggccaggcacggtggctccacacctgcaatcccagcactttgggaggccaaggtggggcgggtcacaaggtcaggagatcaagaccatcctggctaacacagtgaaactccgtctctactaaaaaaaaaaaaaaaaaaaaaaaaaaaaaaaaaaaaaaaaaaaaaaaatttgccaggcatggtgacgggtgcctgtagtcccagctacttgggaggctgaggcaggagaatggcatgaacccggaaggcggagcttgcagtgagctgagatcgcgccactgcactccagcctgggtgacagagtgacactccatctgaaaaaaaaaaaaaaaaaaaaaaaaaaaaaagagaaattataagcaaccccagtttccaaccatgaaaggccagatgaaataaattaggacacatccatgcaaccaagtactaaaaggaaatttaggaatgtatttctgtatatggaaagatgttcataatatatgagaatgaaaatgacagccctcaaaacagtgtttatggtagtatatttcaattcataaaaatataactttttttttctgagatggagtctcattctgttgtccaggctggagtgcaatggtgcaatctcagctcagtgtaacctctgcctcccaggttcaagcgattcttgtgcttcagcctcccaggtagctgggactataggcgagcgccaccatgcccggctattttttcatatttttagtagagacaggatttcatcattttggccaggctggtctcaaactcctgacctcaggtgatctgcctgcctcggactcccaaagtgccaggattacaggcatgagccaccatacccagcctaaaaatataatttttaaaagctatacaggtttatgcataagaaaaaatgggcataaacttttagcagcaagtatatttgggagggggaaatacaaatattcaaagaaaaaacaaactttttctagttttcttcagggaatgtatattacttgcatcaccactaaaaaacttaaaacatgagtgtttctaaatttataggcgcgagccaccgtgcccggcctacaatgtgaatatacttaacattactgaactgtatgcttaaaaacggttaagacactaagctttatgtggtttttaccacaatgaaatataagaatttttaaatgagttcttctaaatttaaaaatgtaaacatgaagaggagtctctaaactgttagacatatcacgaactgggtaggaacaggagggaagttctatattaacctcagggttgcacaggccttaaaaacgtgagaggggattgctttagattaagagacttaagagattaaacaaccaaatgcaatctgtggaccacatttagatccagattgaaacaagccaactgtcaaaggacatcttggagataatcagggaagtctggttatcgtgtgagtaaaaccctttgtctgaggtgatttaaaaatttcctttttaagtagaggtactgaagtttaaaaaacataaatgagtccattaaaaatatgtcaagtaaataacagttcaagcagaatacagatttagcaaaaactgcaacgggagaagtgaaataaaagactgatcaggctatgagccttctgaccatgaggaaagaagcagatttcatgagagtgaatgaggtagaaactaccttaaagacatgatagggttttcctggaggtgaagggagaaaaattatggaagatatagaaaggaagtggttcctgaaaaggatgggagcttattgaaaaggcacaggagccgactgaaagagctcccaatggccaaagctgtagccatttgaacaacaaaataaatgacagtactgaattacagcctgtagaatacatatccacgaatccaatctgatataaaggagggcaatcctccctcacgatgagtatcactgaaaaaggcaaaatctattagctactttcctatgcaacaaaaatattctttgtaagcttttcacctgtgtgacgtgaggaatcccctcttcgaaaaattgcaactttttttttttttttaccacactttgatgaatgttcaagttgttaacaaggtggggctagtgaaaggccttctcacactcacaacactctaggaggaagccaataatgttgagaaaagtgtgtgctgtgactaaaggtttctcaacagtgatcgcactcaacagttttctcttgagaatggagttgataatgttgagtgaggtatgagggtcggccgaaacatttcccacatagctgacactggtaaggcctctcttgagtgtgagttctataatgctgaatgagatatgaattccgactgaagactctgccacagtcacaacactggcaggctctctctccaacgtagtcatgtttccgctgataacgaattaagtatgtcttgctgtgggacaacccaggaggaaggactcttgctgcctcatgggctttgagatgttgaagaagatgcacattctggagaaaagctttgccgcactgaaaacattcaaagtagtcctcctgactgtgaattcttacacgttcacagagattcgcacactggacggaaggctttctaccttcattgcagccagaagtcttcctaccagaatgggtcttctgatgtctgttgaggtgtggcatgagatagaaggcttcagcacactgtttacattcatagggtttcttcccagtatggatccgttcgtgtctcctaagggctacttgcgtactaaaggttcgtttgcaaaattcacatctgttgtgtttgttctcttgggatgctgactggggactcgtacatattccaggagcagtgccttcctggggatcctttcctagaggatcctttgattgtttactaagattagagcttctctcaaattcatcactgccatagcttctttccggagtgagggtcttggggtcattcattgttataggagtcaaaagtttctcttggttgccctggtgtggttccaatggatcatcatgagactctcctgcagagacaatgccagaagttacctaccgcccaattatccaatcctgccccccaataatgatatttctataggcaggctttgccctggagttagtgctttggtttcaggtctcttttcctaatctgaaaaaaaaaaagtaaaaattcctctattctttttactcagagagacataccaatataatagaaataaagagaccaaggataacaaacagatcttatggaggttgagagagttttctgaaaacctaaagagaaaatggaaaaaggatagaaaggacagtaagtggccgggcacagtggctcatacctgtaatcccagcaccttgggaggccgagatgggcggatcacaaggtcaagagattgagatcattctggccaacatggtgaaaccctgtctctactaaaaatacaaaaaattaactgggcatggtggcgcgtgcctgtagtcccaactactcaggaggatgaggcaggagaatcgcttgaacccgggaggtggaggttgcagtgagcagagatcgcaccactgcactgcagcctggatgacagagtgagactctgtctcaaaaaaaaaaaaaaaaaaaaaaggaaaagacagtaagcaaggaagagtgaggaagaaacagaaaaaatatcatctaggaggatggcgtgtcaaaaagatgccacaattgtacagagtagaatgagcagaaatcagagaaagagctggggttggggtttgtcagcattttccaaaccatgtttggcagatcgctaatattctgaaaaacaaatagctgttaccatgaagggggctccactgtcaagttaatttgggaaatgttgtatgacacaaatcaagcaggtttcattcctgtaggattcagaacttttaatatgcaccttgaaccctaaagagggaaggtacagaatgtggcatttcttaaagtgatcttgctatgaaacattttttttagaacatctattactatggttcttcaggactactgaggaaacactggagcaaacaggtcaacaacctcttgttcagaattaaacaaagattctcctttcttagctctgaatctcttgttttaccccaatctacactgtcaaccaatcctctttaattcaatatttattaaatgcctgttttgtgcaaggcattatctaaccagatgggtcagaggtctgtaaaagggactctaatcagactgtaagtgacgacaggagcagagatgggggaactgactccacttaggaacagaaaatgattagtggaggggacagcatttggcgtcagtaaacggggaaggggggcgagtttatataaaacagcctgagttaagctatagaactgtgaaaatatacagtcctggggagctagaaacacaggatcttagttgcaagatctgtagatgaggctgggatgcaaatttcaggccagaatgggaggaacttcagtgttttgctaaaagtttgaattttatcttgacggaggtaagaagctgataaaaagtctgtgctttataaaggcaactctctggttggaaaaatactgaagccaaggaagtcaagtataagactgtggtttggaagagaggtgatgaacacagtggttgcatcctggcagacacttgaagtatgtgaacagagtacaggtaaaacagcagagccagaacatggcttaggaagtcatcaggaaaagagggatagctgggcccatcacaatggattgactcttttaggaagtggtctttgaagagaacactcaagaacggaagagtaagagaacacctagtcctcactggctcttctgttttccttaccctgctgtatatccaatatttcagcatgttctgtcagttcttctttcagggaatacctccaacctgacccctctacaaccacggcctcagcctccatcatctttagcctggtggacttcaatggcctcttgaactggtttctctggcttttcctcttaaagcccgttctccataggacagccagatggatctttctagaatagcactgcccagtagaactcccagtgatgatggaaatggtctacatttttgctgtccagcacagtagccattagccacatgttgctatcaaatacttgcaatgtggcttgtgtgactgaggaactaaattttaaattttatgtaattcttactagtgtaaatgtaagtagccacatgtgcctactgtctagcatattggacagcaaagttctaaaatatcaataacactacttcatgcccctgctcaaaacctccccccatctttgcatctcacttataataaaattctttaacatattcctaagcgggctggcccttgactatctctgtgatctcatcttctatcttccacttaactcagaccatattgcccttcctactgtttttggaacacccaagctcattccaatctcagggccctggcacttgctgttcgctctgcctgtaacactcttcctcaagatttctacattggtcagccccccatctcattcaagtcttccacagtgaggccttctctgactattccatctcaagcaacctcccatatctcattctctatccactttacgctccgttattatttgtctattttttaaaactactgcccccattagaatgcaagctctatgaaggaagagatttgtctgtcttattcattattgtatccacagatactaggacagtatctggcccaccacagaagcctgataaatatctatgagatgactgaataatgaagaaaccagagtagggaaagaaaagaagacaatgaaagaaacagagaggagtcttcctggtaacttcttgaattttgtttggacatccacttttccactcacacagacaaacgtggaggagggctgtgtcaatcagcactgtactggacacagctgctagttcaggaaagggatataacccgatatggaacaatgaaaaatcaggagagctggaaaagatgcttcctctctcttgagaatgcttcttggacacaccagctctttcttgctccttttttgtacaggaacaaaaaaatgcatctaggatttattgtcagagtcgaaggcagagtagaaggagaaaatgaaactaggtcttcgatgacttcactgggtccctgaatacagcccagctgatcagtattataggctaataatccctctatgactttagccagtttgggtgtgggttttctgttaactacaactgaaggacaacagtgatccagccgctgcacatggtgacccatttcatgaagatggtaagcgttattagactgtagccatagagtttggaggaggtgaagtctatggttccagaactataaggacgctagtgggaaccttttgtggaagtttcagaaaagagcgtatatgtgtgtctgagttggcataagtagggggatggaaaccagagggtggggattaagaagaaaagggaagggagcgtctaggtgtcaacaagtctgaggagctgatgtgagggaaagtgggagggcagtgagaaagacaagtggtatcaggccaggattttttgtttgtctcagttaaagaggagagatgtatgatgtttagctgcaaggagaaaggcatgagtggacggaagggctggaacacgagggtgaaaggacactggcctccctggagctaagcaggagaggagctcatgctgcatgaagagatgggcttcagaaaggagaccaaggggagtactgaggagaaagggcacctaccagacttctcctggcccaggggactttgaggaaagctctctgactagcatttactggttccccctcctacaccccgggcttccccctcactactcaccttgacaaatcactgtatgtctgctgtctgtctccattgcatatgattcctcctcttccaggcgtgagataatgtcaggtttagagaactggtgccctgttggagaggaagactgagaactcagggtttcagtaactcccaaccttaggtcccaaagactctggaataataaggaaggaacaaactctcgcaggagtaaaatgaagcctgtttccagcctacagagattttaccccctaagggacatctaaaatgtatggagatatctttggttgtcataactgtgggagcagagggaggggttcctagtgtctagtatggctggaggcagggacactgctcaacattctgcaagacagccccacaacccgggacgatctggttccatgtcaagagtgccaaggttgaacaaccctgctatgaagactaaaaagggggcatgagggcagtgtgctgagctctacacttcagcaccaagaatctgacatagctgctcaaaaagtcaacattatggttcttttccctcctgggataacgtccactgcccctttgtcttgaagtgctgctcctccccctcccttagttccttgtttcccaaacttttatcatttgcataccaaattattatctatttgtttactgtctgactccactgaaatgtaacatccatgagaaggggaaatgtcatctattttgtaaccaaaatgcctataccaggccttgtatgtctgaattcactgacgagttaatgaatgacccttgcattttggcatttctacgtgccatttatagtcatattcagtatttatttaatgtttttctttagatcacctttctttttaacttagatatgcttattttcttttttctttttttttttttttgagacagagtctcactctgtctcccaggctagagtgcagtggcacgatcttggcttactgcagcctctgcctcccagatgcaagtgattcttctgcctcagcctcctgagtagctgggaatacaggcgcccgccaccatacccagctaatttttcgtagttttagtagagacggggtttcaccatgttggccaggctggtctcaaactcctgacctcaaatgaaccacctgcctcagcctcccaaagtgttgggattacaggcgtgagccactgcgcctggccaatacgcttattttcaatggaagctttatatcaaccctataaatggaaaccaatgtcactcacacacacacacaaaaatggaaggtaacatcatgataaatataacagaaactaaggttattgagtgctagctagcttctgttgcctatctaacattcagggtttgatgtctgctctcactttactaaaatggaagaataacaagatagacatgctaacaccaaactgatattctctacgtgataccatcagaaggcttaaaggaaaattgaagaacttctttttcaccaacagattgaaggattatgtcatgctgtccatgtactgcctaaaataatcttctatttagcccactgtactcattccacacttaggaagacaatgtcccaggtgatatataagatctctattaacacaaaaccttcagtgttaaagaagccaagggctcacaagatagaaatgctccaggtcactgcatgagagctggaatgatacaattaatttatttcctctattttgatactattccctctattttaagtcataaaatgtggtaagctagagaagagtgtaaaatatgctggaaaatgtacttccttgtaaccgataagaaccagagttaaacatatgcatccctgtgctaggtttggggtaggatgtgtgttttcccactaggtccctgacttgccagtggaacagtgtttgttttggattctgtttttcaggagacctcaagcccccaaaaaagccactgaaaaaggagcttggcactggcaacgtaaacttttcacttttcactttcaactttacctgtgagaacaggtaaaacaattttgcctccgcacgtaaagagagattggcaatctctgtttcttcaaactcaagccagtagaagtctttggagctcctggaatttttagcaattccttcgctcattcagtaaacatcattttgagccttccattgtgctgagaactggtggagcaaacccctgtctggtagcacatcagagtttaaaagagcagattctggagtctgcttggggttaaatcccagctttcgacaagtactttagcctttcaatgactcaggttcctcaaagttaaaaatgtcaataataacaacaacaataagtatacctccccctcacaggcctagtgtgaggattaaaggagttgaaatatgctaaacacttacacaagtgcctgacacatatgtcgtgctcaagaaatgttagctatgttataattaacagtgaatttgatattcaaatattaaaatattgcctctgacctgggttgagactcactgacatggtgaaccaccattactgatgagaggacacgaaggagttgagagctactgccctagtgggaagaaaccaagtcctgtggagaaggcatacttacccagggagaccaggttccggtaattctccagcatcacctccctgtagaggtttctctgagcagcactaagggaactaagttcctctgggctgaagtccacaagcacatcctcgaaggtcaccaactcctcaaacaccagaaatgttcctaagtgtttgaagtccgggaactatcccagagagaggagaagggacgtgattagagaggactgaacatgatgcaggcattcagaccagcagagagcttccacgtgctctaatccagagccacaggcacctggcattgcatctttctttgtcttatcgagtctgagagaagtgggaacattactgaaacagttcctattgctaattactacagatttgggttgagggggaaatatccttttaagccactttataaagacagaatgcaagcatgcaaatacttaaaagctcagcagtatacctcagcctcaggaatcagagtcctggctctggttctttgtgagtttgggtaggttaagcctcagggtcccacctgtaaaacaaagtgctcataacatgaagaaatattcaatcttgttaataaacaaggagatgaaaatcaaaatgacaaaataccattttatacccattcaattaagtattgggtaaaaattaagtaattgagtgaaaattaagaagtgggacaataccaactattatataaaacatggatccactggcgatgctaagggaaatgtaaattagaaaatcacttttgatccagaaattctttttttaatttttaaaaatttttgtgggtacatagtacttgtatatacttacggggtacatgagatgctttgatacaggcaggcaatgtggaataagcacatcgtggggaatggggtatccatccccttaggcatttatcctttgagttacaaaggataataaagagttacactctttattttaaaatgtacaattaagttattattgactatagactccctattgtgctatcaatagtaggtcttattcattctttctactttttttttgtacttgctaaccatctccacctccctccagccccccaactacccttcccagcctctgagaaccacccttctaatctctatttgaccccaaaattctattcctaggtatatttactcatgtgtacttaaagacatggatgggcatgtttattatagcatgtttggaacatccaaaatctggaaataacccaaacattcattaacagtagaagagataaatatagtatagccatacaatgaaatagtattctagcaatagaaatcaattaactacagttatatacaacaatcttagtagcctaaggttgaatttaaaaggcagataccatatacccaaaggaaaataagctgtcctaccaaaaagacacatgcactcatatgttcatcacagcactgttcacagaagcaaagacatggaatcaacccaagtgcccatctacagtgaactggataaagaaaatgaggtgtgtatacaccattgaatactatgcagccaaaaaaagaacaaaatcgtgtcctctgcagcaaccggaatgcaaccggaaacctcagatgcaacgggaaaccattatcctaagcgaactaacgcagaaacagaaaaccaaataccacgtgttctcacttattagtgggagctaaacactgggtatacatggtcattaaaatgggacaacagacactagggaatacaagaggaggcagggagggaggagaataaggattggaaaaggccatttattgggtactatgcttactatctgaggtgacatactcattcatgctccaaatcttagcattgtgcaatacacctttgtaacaaacctgcacatgtgtgccctgattctaaaataaaagtgaaaaaaaaagatagactgacctcttcaaatctaacattatcctgaggcaataggatacttaccttccttagcaaatctgaatatagaaaattgtaacacgtgtaagaaaatgcataggatctccccactcaaatatgctaatccaataagtctttataaacagttaatgacaaaaattgaaaattaaaacttactagccattttgctcaaaatgttgtagcagttaatgatttttctgtctgtttccagtcatactttggcaataaaaaaaatgattcaaaaccaaaggtacattgttgttaggctgaggtcttaacctggcaatcacagattcttaaggctgagctttgtagtgcatgtgcacctttctggaagataaaaattccgtttctcaaaggagtctgtgactcaaaatatttagcatagagagcaatctcagtttttcataaccttttttcttgtgctttattttacttaatacagttaatatgctacaataccttgaatataatggataatcaatattattatattaaaaaaagattgttaaaagagaaatgttacctgattcagtataagaaaattgaatttagttgtagaaaaggtatctatttcaagtaagaatcactgtatggtaggtcatgatttctcagtcacagtgtcatatttaaacgatggtggtcatgtggtagtcagagcatttttaagactgctatcttactgttcccaaatgttttcctactgttaactgtccattgaccctcctttcttttttccatctcatactctgtaactattagagaaaatcatgggaacaaacctacactggaataaggagttttgagttctgctattagctagttgtaaggcatgggttaattaatctctttgattctcattgtctcatctttaaaataaagagatccattacattatctctaaagtcatttacactctaaaattttataataaaacacataagatcccttgatactataaaaataaaaaggcagataccagaacattacataagactctgatatccattttattaatatacatcttttgtgttttaagtgaaactttctaaaactttttatgcaaatcaacaaacactggattaaattagggatcatatactggctgcccagctccttcagatgggtttatttggctcacgtggtcctattgttttttaaaaatttgtattagctgccaataccaaaaaaaaaaattaggaaatgtcattcttaactggttttgtggcttctgattaaaagcattagaaaatctggggactgggtccacattctcacatggcaccatcagcaaaagctgagtcacagctgcccctatatatgggacaggcactccccctgtttctcataatccacccagaccaattccttatttatattcccttggtagtccctccagggcatctttgcttggaatccctggcacagacaaggtagggacagagggctactctcaggagcagatattctagaacagtgtttctcaaccttttttccttacctcgctccccccaccccagtaatctttatacgtcattttttctaatcacaacccccatgaatttttttctggttctaaagaaagcagagtatattaatttcattattgtcttttaggtttctaaaacatgacttaacaagaacactggagaacatttttgaaacaaaaaatcagaaaacctcataacagtatcatgtccctataagagctgccatttgttaaaggcctacaataagccacaccctttgtgtgggtagaaggggttgtcttcatttacactattttcattgttgcaaagtacattccagcccttgacatggatatactttttcaaacaattataaattagcattgattcacatacacaggtattggatggttccaattttaatgtgcacacaaatcacctggggatcttgttaaacacagattctaattcagttggtggaagtggggccacagatgctgtatgtctatttttttaaataacagctttattgagatttaatttacgtattataaaagtcacctaaagtatacaatttaatgagtttttaagcatattcacagagttgtgcaaccatcaccccaataaatttcagaacatttcatcgccccaaaagaaaccctgcaccttctagcagtcactctccatttccctccaacatcttcccacgccctaccccaagccctaggcaaccactaacatactttatgtctccatggatttgctgattctggatatttcataaaaatggaatcgcacggtaccccatacattttaatatcgcaaatatactgtgtatgtactgtatgtatgtctgtgctgtacacataagaagaatagtatgtgttcaccctcaagaaccaattttcttccccttgaaggcaatatcctccttaagaatgcgtgttccaggacatgactttcaaggaaaaggcccttttcaattgctctgtgactttttggcacccccatatggttctaagaacacttttttccctcaaacagagcctgacaccggtagacgttggtgaataaacaaacagatgatgacactaccagaatcatttgtataatcttgtacaacctgaaaaaagttttatgtttgatgatttcattaaactattattcattattttggaggaaatacatggtaggacataactacctttcctttttttaaaattctggactattctagcctatccatgcttcccagtggaccccattgtctcaaatccccaaatccaaaaatttagttgaaataggacggccagataaaattcagcatgcccagttaaatttgaatttcactaagttttaaggggctgagtttttttaaatctttgacaatttcattcatggatagtgtgttgggtgggaagagcactgggctggcagttcagagacctgggttcaagtactgtactgttttattgttttttgttttgttttgtttttcttgtttgttttttgagatagagtctcactctgttgcccaggctggagtgcagtggtgcaatctcagctccctgcaacctccacctcctgggttcaagcaattctcgtgcctcagcctcccaagtagctgggattacaggtgtgtgtcaccacgcccagctaatttttgtatttttagtagagatgcggtttcgcatgttggccaggctcgtcttcaactcctgacctaaggtgatccgcctgccttggcctcccaaagtgctggggttacaggtatgagccactgcacccggtctgtactgttatttaatttcattggacaagacaggtaacatctctgatctggaccttgatctataaatggtcattgtactttttgtatcatagggttttgtgaagaacaaattttgttatgtgtctattaaaaatcttttttggttttgtttttgttttttgagatggagtctcactctcactcaggctggagtgcagcgacatgatcttggctcactgcaacctctgcctcccaggttcaagtgagtctcccacctcagcctcccaagtagctgggattacaggcatgtgccaccacgcccagctaatttttgtatttttagtagagacggggtttcaccatgttggtcaggctggtctcgaactcctgacctcaggtgatcctcccaccttgggagggatattggcctgaaattttctttttttgttgtctctgccaggttttgctatcaggatgatgctggcctcataaaatgagcctctttttctattgtttggaatagtttcagaaggaatggtacaagctcctctttgtacctctggtagaattcggctgtcaatctgtctggtcctgggtttttttttttttttttttggttggtaggctattaattactgcctcaatttcagaacttgttattggtctattcagggattcgacttcttcctggtttagtcttgggagggtgtatgtgtccaggaatttatccatttcttctagattttctagtttatttgtgtagaggtgtttatagtattctctcatggtagtttgtatttctgtgggatcagtgatgatatcattttttattgtgtctttttgattttttattgtgtctatttgattcttctctcttttctcctttattagtctggtaagcagtctatctgttttgctgatcttttcaaaaaaccagctcctggagtcattgattttttttgaagggtttttttttttgtctgtatctccttcagttctgctctgatcttagttatttcttgtcttctgttaacttttgaatttgtttgctcttgcttctctagttattttaattgtgatgttagggtgtcaattttagatctttcctgctttctcctgtgggcatttagtgctataaatttccctgtaaacactgctttagctgtgtcccagagattctggtacgttgtgtctttgttctcattggtttcaaagaatttatttatttctgccttaatttcgttatttactgagtcattcgggagcaggttgttcagtttccatataatcgtgcggttttgagtgagtttcttaatcctgagttctaaattcttttccttaagaatgttgatattgacctccactctcttctggcttgtagggtttctgcagagagatctgctgttagtctgatgggcttccctttgtgggtaacccgacctttctctctgactgcacttaacattttttccttcattttaaccttggtgaatctgatgattatatgtgtcttggagttgctcttctcaaggagtatttttgtggtggtctctgtatttcctgaatttgcatgttggcctgtcttgctaggttggggaagttctcctggataatatcctgaagagtgttttccaacttgttttattctccccgtcactttcaggtacaccaatcaaacgtaggttttggtcttttcacatagtcccatatttcttggaggctttgttcatttcttttcattcttttctctctaatcttgttttcatgctttatttcattaaattgatctccagtctctgatatcctttcttctgcttgatcgattcgctattgatacttatgtatgcttcatgaagttctcatgctgtgtttttcagctccatcaggtcatttatgttcgtctctaaactggttattctagttagcaattcctctaaccttttttcaaggttcttagcttccttgcattgggttaaaacatgctcctttagcttggaggagtttggataaacaacagttttttacataagtatgtcttaaatatgaaacattgcatccttatgcaaaaaattgtctatctgaaattcaaacttcatagttatgctaaaaatttatttatacttatgctaaaaatttatttgtagttcatctaaaattcaaatttaatttggatgttgtgtatatttacttgctaaatccggccagccgaagttgcagtaactgcactaccttaggcagcaataactaagtggttatgaatgtggactctaaagccagactgcctgggttcatatctcaatcgtattatttaacagctgtgttacccttcagcatattatttagtctttctgcctccactccctcatatataaaaaggggaacaataataatgcaaaccacacaagggtttttctgaataaaatagaatactaaaaaaataagtaaacaattaattcaaaagacagaaaaaaaggaaaaatattaaatatatagtatgtgggatggtgataagtacaacagagaaaagtaaagcacggaaggaggataaaagagtcagaaggatttttcttggagaaataagaaaaaaaagaatcataagcaaatgtcagattagtcagaaaaaaggctcagtaaagtgatatttatataaaaacttaatggaaatgagtatgtggtttaattaaataaggaagtccacaaattaggaagataagatccccatatttgataaccatgtcagaggaaagcctgactcacctgggacccagcagatggcagattgtctaacatctctgtgttcctcttttctgcagggacagagtcctgagcaaggaaacctagaagggagagaggaataccatggaattgagtcctgtctggtagcactgacagacacagtggccagccaccctcatgccaccctgtcctgccatgggaaggaacagcagctctagagttcctatggtgagaaagtcagatatcatttctcaactcaaaataacaagttccaaaagagagctctggttatttcccagctctaaatgcttcaatggctcccactgccttccaaataaagtgaaagttccctccatatcagtcatttcgggcctcactgtccagtcaagatcaccacagaacctctgtttctcaactgtaaagcagaaataatgacaatacctatacagtagtccccacttatctgaggttttgttttctgcagtttcagttacccatggtcaattgggggtcaaaaatatttaatggaaaattccagaaataaataattcatatgttataaattgtgtgccattctggtgatgaaatctcacactttcctgctctgtcccacctgggacatgaatcatccctttgtccagtgtatccactctgtatacactaccccttagtcacttattagctgtcttggtcatcagatcaactatcacggtatcacagtgcttgtgttcatgtagaccttattttacttaataatgcccccaaagcacatgagtagtgatgctaacctactgttataattgttccattttataactagttgttaatatcgtactgtgcctaattaataaacttcgtcacagatatgtatgtagaggaaaagacatagtatatatagggtttgataatatccacactttcaagtgtgttagaatgtatgcccctcagataaggggagtatactatacctctaagggctcttgtgagaattaaacattacatatgtaaggcacacagtaggtatttttttggtaaatggcagctcttatgattaagcctttcctacatatttttcactcgttgatctaaaagacaaccacccctttccctccaggagccttaaccttgatggccttccttgcctatatattctcttttctcggtaaacccttcattaatctgttttttctttctggtaccctagggaactctctttccttctcactgaactctagcttcatcaataactcagtgcctctggccaagtttttagcctctgggacaacatccactatatccatatgaggcactcatgtaacacggtgattaagagtacagatgctgaagccagcagcctaagtctgaatcctgactgccaattattaatataagttgtggaaccatggtcaagttactcaacctctttatgcctctgtctcctggtctacgaaatgaaggtaatacctatttcacagagctattaatagaagaaaatgaattaacatgaaagaacacctatgataatacattaaaacattctaagtgctcaagtgttcactattagcattttaaaaattcttttaagtaatgtgggagcacagaatgggattaatcataatccttagttcatgatatgctatctttattgagccatgcatggctctcatggttattttaaattcatttgtttatatttttaagtataattaaggcctgtgaatgtactatccaacccaaaagtataacattcccaataacttacatctgcctgtgtgcttctttcatgtccatactcgagccttccctctagagataagtatgccctgaggtctggtgttagtattcattgttcccttgctatatatatgccccaaacaatactttgcttttagttagtattatttgtttcaaagcactataaggacccagtggctttcttctctcattcttgaaatgcctccttagctctaatctaataacttgagtttctaagataccagtcaaattttggcagaagttgaacttccagtctttgtatctcccacattttatgcccccttgcatctaaaatttagctaatcattcttgttcttgaatagaaagactaaataatgtaaagaccaattttcccaaatttacacttaatatattaatgccacaagcaatcccaggagttttttttttttttttgtagtgtgtctgtcttgttttatgttgcaactaaggtttacactggataagaaatgtgaggcaaggtgaacaaagctgatacactcagagaaatagtatatgttaaaagcaaaagccaaacccacataggcataaaaaggaatgaaatcatgtcctctgcagcaacatgggtgcagctgaagccattaacctaagcaaattaacacagaatctgcggtggctcttgtctataattccagcattttgggaggctgaggtgatccacccggatcacaaggtcaggagttcgagaccagccctaccaacatggtgaaaccccgtctttactaaaaatacaaaaattagccaggcgtggtggtgggcccctggaattctagctactcgggaggctgaggcaggagaattgcttgaacccgggaggtggaggttgcagtgagctgagatcatgccactgcactctaccctgggcgacagagcaagactctgtctcaaaaaaaaaaaaaaaaaaaaaaaaaaagagaaaaccaaatactacatgtttccgcctttaagtgggagctaaacactgggtatacatggactctaagacgggaacaataaacacggaaaattccaaaagggggtaatgaggaaggagggcaaaggttgaaaaactgcctatccagtactatgttcactacttgggtgacagaatcattagaagcccaaacttcagcagcatccaatatacccatgtaataaacttgcaaatgcacccctgaacttaaaataaaaattttaaaataacccaaacaccaaatttctttcatctcacatgagattaggcagatcagactgaatgtataaaatgcattctttcattcattcactcaacaaaatttctatttagctcctattacgtgccaggcatacagcagatattcaataaacagaagcagccagttgcttcctccttctcaccttccttctcacatgcctgaataaagtttgccaccatggttcctgcctctttgctgttcttgggctgttttgacctcacccatgtctgaatctcctctggcagggtgctcagaaactgtgtcagcactagttgctctatcatctgctccttggtgaggatctctggctgcagccattgcaaacagagctcctggatttggctcacagcttgatgaggcccattcactgacaggtactgaaaatccccaaacttttgatgagaaactttcagtgtctctgtttctagtttcttctcttgaccacacacacaaaagatgtagggattcctcaagatatctgaaacccctgtcacatccagcatctctacaccttggccctttacaggacagagctactcttaaaggcaggctgctccagtacacaatgttgtggaagacggtaggcagggctgtatcagctgaaaggatacagaaacctcaggacctgcagaaattacatacagacttacaactagcctgcatagttatgattggacagtggagtgaaggtgatctgaacaagtattacacaaaagatgacagctataaatagccaatcaacataaaacaaggctaaacttcattagttatcagagatataggaattaaaaccccaataggataacactatgcaccctccaaaatgtccaaaatgaaaaagtcagacaataccaagtgttgacaaggataatagagccacagtaggatgatatatttgtatattggaatgctaaacagaaaatatgaatgttaagttgctgttgaatgaaagaaaccaggctcaaaaaaaaaaggtctgtattatatgattccatttatataaaggtcaaaaacaggcaaaataaacctaaagtgtttgaagtcagaatagtggctgctgttggggggaagggtggtaatgactggaaccaggcattagggcttctggaaagctaggaatgatgtggacacagtgtattcactttctgaaaactgagctacacatttgtggtttgtgcccttttccatatgtatattttgctaaacatttattagctgtattatagttgtaggaaaacatctagtcataatatcaagcggaaaaaggaaacctgtacataacaatatatgcttacccatataaagcagagaaaaggtggtaaaccaaaatactgtgccagtgggttaagtacgaacggtaatattataagtgatttttataggtgattttgtactttctctcaaaactattttctagcttcaagatgttctacaacaaaccttcatttcttctgtaatcacagaaataaaacataccttccataaaggctacactcactctaagaaaccatgaacaaagatgccacttggggaaaacatttttttcttttcttatccccactaaaacttacgccttttatttctataatttaacagtttttccatttgaaagcatttatttttgttttccattagaaatcataacgtaatgaacatcactgaaactaagtatttgctcccaaattacatagacaaaagggataaactgtttttaaaagttcttgacacaatctgccaaattttcctttcaacggctaccaacttcttcttccaaactcaatgtataagattacatgtctcactcagtccaccttacaagccaatagtgccatcttcatgggcttgtaatcagggcagtcacaagagccccattctcataaagcccacaggcctagtttaatgctttactgtcactctcttgaaatttttcacaattttttggacaaggagccccacattttcattttgccctaggccctgcaaattatgtaactggttctgccaatcaagagcattatcatccctcaaaatctgttgtcaattagacagattgaaaaatatatcattttattctttaattttacatttcttttgattaataatacggctttctctttgtttcagatttacaagccaattataaattgttcacgccctttgtgcttctttacattggggtgtttcttttttttcttttcttttttttctttttttgaggcagagtctcgctcagtcgcccaggctggagtgcagtggcgcaatcttggctcactgcaacccctgcctcctgggctcaagtgattctcaagcctcagcctccggccttggggtgggctccaggcccaccagcgcagagccgtcctgggtccctccctgcaggggcaccgattttagggcagtcagacgcagccctcgcctctggggtggcttttccaccacaaggccccagtagggcccgccgcggagtcttcctcacgaagccgcgcgctgccccgcgctggatgcctcttgcgccctcaagtccactggggccccagccccgcccaggcccctggctgggctacccgctcgccggccgctatcctaccccgggcccagcgaacttacctcgcacgcctcacgccctggcctggctgaacgtctccacgccctgaccaaaaccagcagcgcatgcgccgtggctggcttgcgcgtgcgctctgcggtggacgggctgaggaaccacagccgctcctggccaagtgccctgtgagacacgaggatagggttggtacggcgaggagaagggcggcgacgtaggagggcgctcctgtgaccttccttcttaaaactaacgccttctgttggtggtgggcgcctgtaaccccagctactcgagaggctgaggcaggagaattgcttgaacctgggaggcagaggttacagtgagccgagatcgcgccactgcactccagcctgggcgacagagcgagactccacctcaaaaaaacaaaaacaaaacaaaacaacaaaaaaactaatgccttatgtaagttttggagagttaatatgttacttagaacttgaggataagtggtaaaaataaaaaataacaaactaatttcaaaaatttgaaaataagcggtagtcagtgaaaacccttcctcacaccacgtgtgcaccattcaccaaaattttacccccaaaacatacgtaaccactgtaactgatctgaagtgccccaccaatgtttctttatacttgtagaagaaatgtatatgtatatgtgtgtaaggcttccctcagtattcctgggggatttgttttaggaccccccagggtatcaaattttgtggacgctgaagcctcatgtaaaatggcatagtatttgcatataatctatgcacatgcttaggcatactttaaatcatctctagattacttacattacctagtacagtacctacacatcattcttgcggatttgacagtacgcagcacacatggcaaatttaagttgtggtttttggaacttggtggaattttcttccaaatttttctttttctttttttttaactttgttagagatgatgtctcactctgtcacccaggctagagtgacagaacagtggcatccccgaagctggatgccactgctgcaggttggctccactcatgcccgaacctctaagctggaggctgatccccgctggagagcgggtcagtcctctaggcccagaaatgaccaagcaaagcttaccctctggctgctcacccatggacaactggggtgagcttgctcagtgagtccactaaaggtcccccaggcagtggggggtggggaggctgaccatatgcccagaatgagtgggacaaagagcaggcaaatgaaagcgttgccagaaaagggtcttgatccaaaccccaaaagagggttcttggatctcacacaggaaggaattcaaggcaagtcacagagcatggtgaaaaaggcaagtttattagaagctattccattacagagtagggtgtcgtcagaaagcaagcagacaaacacaccatctttgttttaagtttttaggggtcttgtctacgtaaagactaaactaagctgtgactacgtgagggtgagctgaaagcatgacaaaatttattattctattgatttaaagaggccaggcacggtggctcagccaggcttggtggttcacacctgtaatcccagcactttgggaggctgaggcaggcagatgacctgaggtcaagagtttgagaccagcctaatcaacatggtgagaccccctctctactaaaaatatttttaaaaaatagctgggtgtggtggtgcacacttgtagtcctagctactcaggaggctgaggcatgagaatggcttgaactcgtgaagtgcagtgagctgcccactgcactccagcctgggcaacagagtgagactatgtctcaaataaataaataaacaaataaataaataaataagctgtgactatgtgagggtgagctgaaagcatgacaaaatttattattatattgatttaaagaaaaccatccttagaaaggtgagagaggaattgaagggttgacagtgtagactacagaaccaggaaatgacctaccagcaagtcttttatgtgtgtgtgttcttttctatttctttctgtttattcctgttagtgtttgttctcttatgcctgtgaaaacctcctacatgtcaatttccatgcactggaggaacttggatttctccccgtcttaaaagtacctctttcttcttctcctccttcttcccctcctcctcctcctcttcctcctccctgaggccctaaaaacaaggtggccttggctgctctaccaaaaggaggatgattcagaggctgtgagtttaagggaccacttttgggggattggaagaaatctccattatgaggttaaggtacctatgggagactacctgagacagggtgccagtgatgcccactagcctcaataagacaccagggatgcctgagtgcaatggccaatatcggttttgtgcacagtaaggaaaatttagagcttaaatggttaatctgctgctacagagttaagtagaatcctctaaagctccatatcttcctttcttttcttctctgccagctttgaatctgctgttattaagttgctggtgctgaaataacacttattatttatgatctaactgaaatgggaacactggaaacttctttgaaactgaagaaaaaaatgaaaaagaagtttttacaatcaaaactgccatgaagactgctttacccaaaattttggtccacagctttcattgaattacttatcagggcaaacaaagtttagccatgtgaacacgttccaattttgttggaaataatttggatccagctatctttatacaatggtgagttcgtattgcatctcatggctaaaatactgaggtaaaggcttttggatctttgtgtgtgtgtgtgtgcatgtgacaaaaacaagcaatggggaaaggagtccctatttaataaatggtgttgggagaactggctagccatatgcagaaagttgaaactggagcccctccttataccatatacaaaaatcaactcaagatgaattaaagacttaaatgtaaaaacccaaactataaaaaccctagaagaaaatctaggcaataccattcaggacatgggcacaggcaaatatttcatgacaaagatgccaaaagcagtagcaacaaaagcaaaaattgacaaatggaatctaattaaactaaagagcttctgtacagcaaagaaattatcatcagagtgaacagacagcttacagcatgggagaaaatttttgcagtatatccatctgacaaaggtctaatattcagcatctacaaggaacttaaacaaatttacaagaaaaaaaaacaacgccattaaaaaatgggcaaaggacgtggacagacacttctcaaaagaagaaatttatgtgggcaatgaacattttttttaaaaaagctcaacaccactgatcattagagaaatgcacatgaaaaccacaatgagataccatctcacaccagtcagaatggctattacttaaaggtcaaaaaacaacagatgatagcaaggttgtgaagaaaaatgaacacttttatacgttggttggagtataaattagttctacccttgtcgaagacagtgtggtgattcctcaaagacctaggggaagaaatatcatttgacccagcaatctcattactgggtatatacccagaggaatataaatcattctattataaagatacatgtgcatgttcattgcaaaatagcaaaaacatggaatcaacctaaatgctcatcaatgacagacttgataaaggaaatatggtacgtatacaccaaggaataccatgcagccataaaaaggaacaagataatgtcttttgcagggacctggatggaaccagaagccattatcctcagcaaattaatgcaggaacagaaaagcaaataccacatgttctcacttgtaagtggtagctgaatgatgagaacacatggacacatggtggggaacaatacacactggggcctgttgcagggtgcggagtgggagggagagcatcgggaagaatagctaatgcatgctgggcttaatacctaggggatggaatgatctgtgctgcaaaccactatggcacacatttacctatgtaacaaacctacacatcctgcacatgtacccctgaccttaaaataaaagttggaaataaaaaaaaccctaaacatatacctactacctgatccagtgatttcatttttaagtatttacccaagagaaataaaaacatatggccacacatgcaaaagaaatacttgtacatgaatgttcttagcagctatattcataatagccaaaaatctggaaacagcccaggtgtcaatcaatagtagaataaataaccaaagtatgctaggttcatgcgatggaatactacactcagcaaaaaaggaacaaactgcctatacatgcgataaaatggatgaatatagaaaaacatgctgagtgaaagaagagttacacaacgaatgcatgctgtgtcattccattcatgctaattctacaacaagcaaaactaatgtgtggtgaaaataaattggtggttgcccctaaggagacagagttggagactgattgatgaggagcaagagggaattttgggattgacaatattgttttgtatattaatagagatttgagttacacaggtgtacatattttccaaaactcattgaataatatccttaagatctgtatgttttgatgtatgtaaatttgacctcacaatagaaaaaaaagaatccttaaaaaaatgaaagaactaagtacatataaatgggaaaaatgcttgtagacagacttttcatgtaatttaaaatcttataattatcttgaataataaatactcattagatgttgggtgttttccaattaaaaatgggttataatatgaaaaaaacatgtttctaaaaattacagaatggtttcagctataaaatgctaacatctgataaacagttcaagatttattgcttcctgagttttcactaaaatttaaggttactaaaagtaagaattgcaataatatataactctgtaagttgtattcttattgagaaaacaataattttatgtagtttagaggttatttaaaagttatttatttaaaaaggtagaaaggaaccagtaagtaagagagagaaagagagaaaagatttttagacataaagatgtatttttggtaagaaaagaaataattttatataagaaaaggatttcatgtggtaaagttttgtcctaaaataaaatgaccgattattttaaaagaggtatgatagaacaaatcaaaaggtccaagcatgtcatagatggtctgtgtaagttcatgatcaagtctgtggaagaaaatttataaaaggaattttgtatatgattaagttggctataattaataagaaattattcataatagtctttctgagattggtcccctatgttaaaacaaggtttcttgatggtattactttttttttttttttttttgagacagagtcttgctcagtcacccaggctggagtgcagtggcacgatctcggctcactgcaacctccgcctcccaggttcaagcaattctctgcctcagcctcccgagtagctgggattacaggtgcccaccaccatgcccggctaatttttttgtgtttttagtagagacagggcattcatcatgttggccaggctggtcttgaactcctgacctcgtgatccacctgcctcgccctcccaaagtgctgggattacaggtgtgagccacctctcccggtctctttatggtattaatttactattaatgagattgtaagaggttttgatttttaattctataatctttgacctatagctcccttatcctcagtggcctctgcaggcaacacactccctccttaccaatccccttcagactctgctgagggactcagcccagccactacctggagcaggacatttaccagccttactctatgatgccccttccagcagatccccagtgcggaaatagagatgtttgctgtacattttcccttcacaacttcagagctttataacggaaagtctcattctaaaggactaagggaagatcctgaggggtttcaaaacctcattcagaatagtttcagacccatgacctcaactgggcagacgtccagtcccttttaatattctcctcagtgaaacagaaaaatacctctgctctcaaaagggcaagggaggaagtggaccaatcccatagagaagagacaaacaatcctattgtagctctcagagcacagcagacattagacataaactccaaaaagtaaaattagagctcgatgctctcatctcaagactagtagacctggccaataaggtgtccaacaaccgggatagggatgaagaacataaagaagacagagaggacaaatggcaagcccacctactggctgttgccctcaagtgccagctggataactcacaggatacctatccataaagtaccacagctgaagagagtgatcccaggtcccctaactaacagaaaggatcctaaagacctaagggactaggaccaaaccaacatgccctctataagggggaggatcactggaaaagggactgtctccttcatgtctgaagggagggggaagagggcaggttccaccaggtgcctcacagaggcagatggtccaagtagtaaaaatgacaggtcctggggactcctcaattggccctccaggtgtccatcccccaggagcccaggctgacactgggcatgaggaacaagcctgttgacttcttggtcaacacagggggccacctacttggttttgaataccctcaaggataaaattacccaccaaaattgactatggaaacgtgagggaaggcaaaagatagcccctttattgagctcctaaaatataaactagatcaaacgagatgcactaaaagggatggccccaatgattaaaaagcttagaaaacagggacttctgagggcctgtcaatccccttgcagtactcctatcctccgtgttaagaaatcaaatggaaaataccaattagtgtaagatttaaggacaattaatgaggtcacagaaaacagaaacccagggtacctaatccttatactctatggtccactctgcctccaagttgtacatggtactcagtcctggatctaaaagatgactttttctgcattccactggccacagactctcagcctctcttcactttcaaatggcaggatcctcagacaggcaggaaacagcaactgacatttactgtgttgacccaggtgttcaaaaaacttccccaaaatatctggagaggccctagccatgaagctggaggatctgaccatttcgaatggatgggagaatgtgaccaagcattccaaaagctaaaaacccagctcacgagagacccagaattagccctacctgatttaagcaaacctttccatgtttatgttcatgagaggggaagaattgccctaggaatacatattcaaaggttggacccactgacctgggtaatgatctacttttccaagcagctggactcagttgctaaaggatggccaccttgcctttggttggggatggccatggccaccctttcaaaagagacaaaaaagttaactgtctggactccccaccatacccagaccctcataaaagaaagggggcagaagggctgtccccaggcaaggctctccagttacaggtaatgcttattgatgacccccacataactttgaaggtgtgtaacagcttgaaccctgccaccctctttccatctgaagatggttacctatctcacaactgcttagaggtgatggtgaagtgtactccagtagcccagaccttaaaagtgaacctactgaaaatgtggaagtccaatggttcactggtaggagcagctatctgcaagaggaacagaggagggcagatgtgctatgttctctcccactgaagttatacaagccagcgctctcttgccaggatgctcttcacagaaagcagagcttgttgctctaacccaggcgttagagtttggggaagggaaagtcctcaccgtatacactgattccaggcacgtgtattccatcttacacccacatggggctatttggaaggaaaggggcaggttaaactcttaaacgttagtgccatcattttaagattattggaagctggaagaaaaccagcccacatggcaatagtccgttgctgaagccaccagaagtgggacattgaggtaattaaagaaaataataaagccaacctagggtcaaaacaggcagctttagggaaggtcacattccaaatgccacttttgcctttcctcctgggtcctgctcttttaaccccagttttctctcaaaaggaatggaaaaaggcgaccaaatggggttataccaaaaatcctgaccatccaggatggctaataaaccctcgtggacaatttcttttcctaaaaacagttgcactgcaggccattaaaaaggctcactctaacacccactttggtgaagaaatcctttataactgattttgtgaaagcatgactgtcccaaacttcagggagtcaatcaaaaaggtggctgggactcatcccacctactatgttaataacccctgatacccaccccacgtggggatagcaggggtgagaggaactcagagagggctcctcagctggtccagttccaaggtagatgtccaggggaagatgagaaagttttcatagttatgcccagaggcctgggaaactttaaatacctcctgatcttcactgacaccttttcagggtggatagaagcctttgccacctgcactgacactgcacatcaggtggcaaaggtgctattaaagaaagttgtcccaagaattgggctgcctcagtcaatccaactgagggaccagcattcatatcttccattactgaagctacttctcaaagcctagaaacaagatagcacccacatgctacctggagaccgcagtcttcaggtaagcaatgagtaggtgtagcgatttctgtcaagactattattcctacctaatggttatttcctcttctacatgcttgacgtactatgatctcatgtaaccctcacaaggtagcctctgttgttatttctccattttacagaagaggaaactgagacaagaaagcttcactaacttgtcccactcagtatgattagaatgggacaggcagagggttaggattagaagtgtgcatctaaccttcttcaagggtggaaatttccaatcagttatgttacaaacatttgtaaaataggcatgttccaagaatggtacaagtaatgcactcacttaaaccttatagtaaccccgtaacgggggtactaacaccagccccattttacagatgaggaaactgaggcacagaatagttaaggaaataacccaagattgacagctgttagtggcagaggcaatatttgtgaccaggcagttagaccccagagtctgggctttcagcttcaccaggctggcattttcagctgcgaggcatcagagtagactggagggttgggtctctgctctgtcccccttcctttgcagaaccatccttcctctgctccagggtttttcagccttggctctactgacattttgggtcggttcattctgtgtcctgggggtggggacactgtcgtgtgcattatagggtattgagcagcttccacctatgagatgctggtagcatcaccccttcagttgtgacaaccagaaatgtttccagacattgccacatgtcccctggagggcaaatcgttcaatcccatttgagaaccacagacttactccacaatttcattgtttaactttagggagagtctgggaccttccactgggaagggccaggcacgcaactcaggctgggccaataagagtcctacatcccccagttgtggattggttctgcagtagacatgtgacccatcatggaccaatcaaaatattccccaatccttccttacttgctttatctaagtgtctcccactgattgtttattagttgcaaggagggaaaccagaaagtattcagtgggtaaatcaggcaaccaccttgactgggtggatcaaaactagcatcaccagtgatggcatatggatctcttgtgggttaaaacgtgaggtcctgaaaggacacagaatcacttatgtggtattccaggaacgactgcataacctgaatctaattcataggaaaatggccccccaaaccccaaagtgtgtcagagtgtgacttagaaaccaaagaaaggctgaggaggttttccagattaaaggaggctactttacaactgctaaacacaggcctggtcctagccctagaaaggatactgtactggagaaaaaaagaatatttaaatggagggtatttagcaagttgataaaattggaatattgacagatttgataaaagcactgtgtcaatattaaatgtgcaaaggttataatagtacctcagttatgtaagagaaaattcttattcttaggtgacacagactgaagtattcagaggtgagctttgtgatgtgtgaaatctatgcccagtggttataaaaataatgtattaggtatatatataatagagtgtgcaaatgacaaaacaaataggagaaatgttaccaatcagtgaagatgggtgatctttgtactattcttgcaactttcccatgagctttaaattatttcccaatatttgtttgtttcattcctgtaatgaagagcccccaattaatagatgcttaaatatgacagatgtttatttctcatgtaaaagcctggataggtagtcaagaatcatcagacataagctcttatctcattactctgacatcttcaatacatggcttcccttttttgatccaagatggttgctccagttcctaccattatttctacattccagcctgtggggaagggggaggagagagtagaaggctggttgtgacctggaaatcacacatacctttactgtgctcatcccatggaccagacattagtcacatgcctacttctagctgcaagggaagctgagaaaatatttacttcttctaaatagccacataaccagtcaacatttagcaagaacaggagaatgtatattgggagatatattgttactgccttcctccccgtacatactgctgtggtctgaatgtttgtgtccccacaaaactcatatgttgatgttcaaaccccaatccaacagtactaagaggtggggcctttaggaggtgattaggtcatgagggctaagccctcatgaatgggattagtgcccttataaaagatgtgcaagggagctacctagcctcttttgccatgtgaggatgcagcaagaagtcatcatctttgaagcagaaagcaagccctcatcagactccatatttgctggcaccttgatcttggacttcccagcctccagaactgtgagcagtaaatttctgttgtttataaattccccagtctaagatattttgttatggcagcccaaatatacacatactcttggttccatgagggcagggaccatgtctgatttgtcccccacagaatgccaaatgccccaaacagtacctgacacttacaaatggcccatcaattattgaatgaattaaggtggcttgggagttcagagtcagagaaattttaagaagaccttgcatggagaagagacctcatggttcttgaataaaaggcaaaacgtggttataaaccaaaatgaaaattgacttctttcccagtgatccctgaagactaattcaagatgacaggcaaatgaccaacgtatccctttatgcgcttcctcatgatgggatgagggaaaaaatagaataaagaacttaaatcagaattttttgagaaagtgagttcccatttgtatcatgttatgattatacagacagaaactttccatatgttcagctgtgataggatagattcccttgaaaataagtcttcttgagtttggaatggtcatcaatatctctgacagggcaacaacaacaaaaaaacatgtctaggccaggcacagtggctcacgcctgtaatcccaggattttgggaggccaaggcaagagggtcacttgagccctgggcaccatattgagatcctgtctctacaaaaaattaaaaaattggctgggtgtggtggcacctgcctgtgatcccagctacacaagaaggtgaggccagaggatcactcgagcccaggaggttgaggctgcagtgagctgtgtttgtgccactgcacttcaggctgggcaacagagtgagaccttgtctcaaaaaaaaaaaagaaaattaaaaagaaaacacatttgtgctagaattctctgcttgcaagtaacttaaattcattcaggttaatttaagggggaaactggatcttactggaataatattgtgtagcttaaaatagtgagtaaagagttatcagtccttctagtaggacagcaatcaaagaagacttgttaatctcactagggggaaataatagactgccttttctcagtgtggccataagaatgactgggctttgaacaccttcaatccatgtattgctctactgaaaattcaaattcttgggtgaggaagtctgactggtctaccccaaaccatgtaattagtcctttgctggcatgagggaggggcagggatggtgatcagaaggaatggggtcaggatagtccaccaaaaccatgcagtgtgctgttatttaacggatgctgggcatacagaagagctatcctggacaattcaccctttggctttgtggaagaaaccatgcaattatcacggggaaccttcttgaactactttggtttgagagtagtctccccagattttttctgtactccttgctgcttcatatggtatataagtggtacgaggcatgcagtaagtcagcagacattcctgagaggctggtgggcaggaaaagtcaagtctaagtccagaatgaatctctattccatgaggctacaaaactgccctttctgtggttaaaagggcttggtatgatcaatcaatctgctgtctggctggtggggagatatggtaccagtcctggcttcttcatcactcctgcctttctaggggaggagtgacttaaactcgagagctggctagcctgcagacagtgtatgttcattgctcttcaccctgcaatgttctgatccccaacaattagtgtttagattcaacatccactaatccttgagaggtttgtcaaaaaatggattaaccatgtaaaagaaaccaagggcaggcagttcagccagactccacaaggcactggggtggatgaggcaccaggaaccaggattccctctggctttatggtctatttccttctaggcctgtttattcacaagtatacccagccccaacccatatgaccacctaggtagccctcactctgagtctgactggacacggggaacctatgggcatcaatcaactgacaccagggagaggtcaagtctaacagaataagcatagcagtagggaagttagttaccccttcaactgggttgtggggtggaggaaggaattgcccaagagtataaggattggtcaaacaacccctaatgacacctacttcattcccttcctttacagcctcttgtaacacattatttaggaaatccatccttaaaaagtcccaatcctcccaccctgacctatgctgatgctcgtcacagaatgaccatggaagctgtgaccaaatagtcagatgccacaagatataaagttctaagaacatgaaagaatgcaggactctgtcaaatcctagttagaattagtggcaagtacacttttatatcttaagaacaaaatccaatcatgtgacatgaaggatattagacgggcatgaagtacacaatcatctcctcctccgacttatggaatcagggacacagcagccgcaaattgggtatggtgctatccactgtggtcgccaacagggttccagttagcaagctggttgaaaagctctgatcattatggaatcacaggcatgtttaaaaattactctcagggatgacaatctactgaattgcatgggatgtttctcgtggggaagtcaggttaaagtatggttaatgaacttgggggaaaaacagtacagagatgacccactcaggataattaccttttaacctcaggcaagagtcaggaataaacacttgagattctataacatagtatcaacacttttatgttaagggtttattattgtctgtgattttttatgtttgagacaatctcacatttccaattaaaaatgcccactcaagtaactaagatgtacttgcggtcattatcaactttaaaaaaattgttggaacatatgttttagtttcataagggcagttacaaatgtgaaatcaaacagtatttaaaaatcccttagaagtaattgttgaaatagataatacttaaaaatagagtaagatttgcaaaccaaactttttaggctaaaggaggaactaagcttttggatttataactctaacaaaataacatatttaaagccccaaaaacaaaacagacaaaagagactgagaaatatttatttttaactttatttttattgttgacactattacagatagaatgaccacaaccatattaacaaaccaaaaacctgtgcacagaaacaagatgaagaaaatatatcaagatgttaaccacactctttggatggtgaaaacatgggtgagtttctcttctacatttctgtaacttcaaagtttctataatgaacacatttcatatataatggaaatatatgtagtaaaggtggactaccaaaacactagaatgatgacctttcaaggaaaccgaaacaaaataaccataatcccacaacaaccacacaactatttcttgtttttcatctttcttcccatctttgacatttatgcatacttatcactaacaccctaataatcacagactagtgcacagatcaagatgttaacagttaattgttgttgggtgttgggaatatgtgtgaattttctttactgaatttccaaagttttgtatgagtatgtattatatttgtaatggaaaatacatacataaaatttattaccaaaacaccaaagattatttaaggaatttgagacaaaatatttaaccaaattcccacaatgacaacactattttagttattttccacatcttttcatttaagactttatgcacacatatttaacactgttatcacaagcgtgtgcactgaaacaagatagaggaaacagatcaagatgttagcagtagttgttaggtgttgggaatataggtaattttttaaaataatttactttattttctaatttttcctctgggtatgtattatgcacaccaatggagacacacataatacactgttatcaggacattattatagggaacatttgaaaaaattaaagtgaaagtatttaaccataattccacaaaggtaatgtaacagctattttgaatatacattttgacacagttataatcataaacctgtgcacagaaacaagaatgaacaagataagaggagagtatatgtctttggatggtggggatatgattttttttcctccacttttctgtattttccaagtgtgtgataatgagttcaaattatgttcacaatgaaaatgtgatcataaactttttagtaacactaccataaagaacattcaagaaatttaagaaaataatgctcaactataagcctacaacaacaacaccacaacagcttttgactataagcatatatatttttaaacagttataatgaactgtttaaatgaactgttaaatgaacagcatataaatgaactgttgagttataactgtagtataaatatactttcgtgtcctgctttctccacttaatgttctgtaaatatatttccacgttgctacataactcgtgattatcatttttaaacagttgcattaagtgtccacagataggtttaaacaatcattctcttgtttaccatttgttactaccttttcactagctgaaggttggaacggacaccctgacttacagcaagttgctttctgaaaaggggctaccactgccaacaatgttaacaccaagtaatgtacccacaaagttcaccccgacatcaacactgattctcgtttcaagagtccttttcccatgtagtaaacctcactgcccctcagctttcccgatgtccgttccaacctcagtccttcctatgcagccagccctcacctacaccataccatcaaaaactccttttccaaactgctcaggacaccccgctcaattcattctcagaaacctggccttctacagttcttgcctctggtgttttcttctgtctgtctcctctcccctcctagatctggtgatatattaggactcccttctttgactcactcatttctgcttcttgctctcagctctacaatcttcctaaactttgacactccctgcatctttgacatacttccaagccctaatcctgcagatccagaagagtaagattcagacacatttcccccagtgggtactttaattttgcttgttcaaatgatctacacttacattttgcaaatctttttttttaaattttttaaattttatattttttttccagccaactcaaggccaaaaaaaatttcttaatatagttattatgcgaggggaggggaagcaaaggagcacaggtagtccacagaataggacacaagaaacctcaagctgtgaggtcaatttgtaattaaaagaatactaagattagatgaacacaacactcagaaatactctaggagagctgaaaaagaaggaacagatgttaacaaaacaaattaaggctgctggggaacctgagtccatgttaagcttgggttgactgtaaagaatttttttttttttaatgcaagttagacatggagttagagggtcagataaataacgaagagaattaagttagcgatagaaagatctaaggatactagctcctgggcacctagggtgcaaactgacttgtggcagcataagctgatgctgcacaggggacccaagccatgttgctacttgtcacttaaggcaggaagcgcacaaaggaagtgatgaaaggttattagcctgcaacattatttacagcatgagagcctctcctacggttctcaaccttcattaggcactactgtgatctagtgatggttgtaacccattctttaaaggcaaagatgtaagatttacagggaaaagcttcgggttttatcaattcactatcatcaaacacatattgagttggttaaaaaaaaaaaaaacccagaacacaaatgtgtaatatttttgcatgagaaccacttcaacaaacataacatgtggcaaccaatcaatctgggtcacaaaaagccaatccgtatattgtaaagccttacacagtattaggttccaaagtgttggcgcagatgaaatggctgcagaaagaagctaaagtacttatcttttcaaacagtaaggagtaaaagccatgttatctatcatgcctacagcttcacaagactatttaagggtaagaaacaaaacaattactcaaaaagatattgacagggttcaaataatgcacaataaatctttctcaggatctaagacacttaaaaatataatcaaatttgttgctctcttcctcctccaaaaaaaaaaaaaattcaaagaataccaggtaaggtacctctgcagagtaaactgtaactgtatatcatataaatccaaatatatgtgatcactgttctgtcataatttgctattttatatacacctcatgaaacactatatatacgttacacaagtgtcatttacagttgatttgggcaaactctgtagtctggaatactcatagggttttctcaatctgattacttggaaaggtaagatgtgtgctatggctttcccacatgcagacactgacatctgaaggggaaagcttaagactgtggaatctgcacattcggtctcttttcaatctgagtttagagatgttaagtcaggtgtgtaacacactaaggttaagtctcctactgacattatcatggattggtttggattctctgtggtttggtaagggtcaagtcctaggtgaaggttttctaacctttaccccatgccctcagccagtgtgggtattctggtgtctggcgagggacaggcggtcattgaagagctgcccacagacgtcacatttgaagtacttctcatcagcttgattggcaccacctgtgctggtgctggcacgttcgatgtagcctgagcactccccaaaggcatttgcaggctcaaatatgatcatgctggcatgagttttcaggtgttcactgaatgctgtgctggaagtgaaggtttctgtgcattcatggcagtcatagtatggttcttctacctgaatctcttgatcttcaccttcttctgggtcttcaattcccacaccgtcaggctcgtcggcatctccctctggctcttcagcttttccctctggctcttcagctctttcttctgggtcttcaatacctgcaccatctggctcatcagcatccccatttggctgctcggcctctccatttggctgtccagcctctccaatgggctctgcagcctctccatctggcccttcagcctctccgtttggctcagcagcctccacttctggctcagcagcctccacttctggctcggcagcctccacttctggctcagcagcctctacgtttaagccctgaatcctcagaactacttgtggaacatggacattggcttcaacttcctgggctgctgctgctgcagctgctgctgcttcatcttcttcttcttcttccagatgaagctccttatgtttagtgaggactgtgctatgaataaaggacttaccacaatccttgcattcatagaatggtatagctcctttgaggggctcagtaagaaatgaggtgtgagtataggaggacccgtactcatagggctcattcttatgaacagttacgtgatctgcaagttctgctgggttgacgaaagattctccacagactgcacattcaaagagtctctcttcggtctgacttctctgaaactcagtgagggctaagcctggaatgatagcttcctcagccatctggctctgctccagtaaatcatcttccctatgaagtctcatatgctcattaagggcagagctatgaatgaagccttgtccacacaaaaggcatcgaatggccgacccagcaagagcaggattcctctctgcagcacgattcctccgtggcttcatgggcaagagggcaataaaaccatcatcacaccccttcatggaatacaactggtcttgttcatggattctctgatgctcgaaaaggaatgagctatgaataaaagattccccacactttggacattcatacagctgctctccagtgtaatctctctgatactcgctgatggaatgggtgtgaattacagaatgtgtgtactcccgactgtcaaccaggcacttcctgctgtggactttctgatggtctgtgaggtctgtgagatccacaaagcccaggccacagtcctcacattcatagattttgtcatcagggtcatccttctgagggtcttccatgtctgagccttgaatgacagggtcttcaattgtctcctgaccatgggtctcctcgctgtgggtctcctccccatcagtattctcgccttgagactcctcgccatgagacttctcttggtcatagattttctggtttgtgttgaggtcttcgctggtagcaaaaaattgtctgaagtccttacatttgttccgcgcttgctctttagcatactgctcttgggcgtaacttgtttgagggtcagtaggggccaagctgcgaatgacagaccattcatagtttctgcttccagagggcttctccctatcatgaatcttctggtgctcagtgaggtcagagctatgagcaaagcactccccacactcctgacattcatagagcatccctcgagggcgaaatgtttgttcaccaaaaggcagagagtgaattacagaggtctcattgctcctatgctcaatgtatttctttttagcacgagccttctggtattcacggacatttgagctgggaacagagaattcgccatccttcttaaactcaccagatccctctccaggaacacttttctgaggtttggcacggaatacactctgtatgacagagtcttcatagttgcgattcttactgcccccttcacaagggttctctctggcaggaatcttctgtcgcttatcattaaggtctgagatataaatggaggattctcccttctcattagattccaccaattcatttccattgtgacttcttggaggtttggaagccactaagctatggataacagacctactgtattcccttccttcagaggtgttccctccagcacgaactctctgatggttgatagcatcgaagctctgaatggtagactctgccattacttttggtttactgggccctgctacactgtgacttttctgagcttccacagaggctaagctatgaataacagacctctcatatgattttgcctcatagacattttccttagtgggaatcttctggttttcataggggttagagctaatggtgaacgccttttcgtcctcatcactttcaagaggtcttgttatagtatgactcttctgagattcagtgaatggcccactatgaatgacagatttctcataccctctgccttcaaagaggttctttcgagaatgaattttctgatgctcactgagctctgagctttgcatgaaggcatcccggccatctgtaaagtcacagagcttctccttattgtaagttttctgacgccttttaagggactgaccaggaataaaggtttcctcacacactttacccttgttttcaaatgggttccctctagtatggattttctgatgttctttcagggatgagctatgaaggaaagtctccccacacaccttacattcgtacattttctctttaccatacattttctgaaactcattaagggctgggctgggcctaaaggtttccccgcgctcacgttcacgttcacgttcatgttcacgctcattatctttgtcatccccaaagtggattttctggtgctcaatcagggcagaactatgaaggaaggtttccttacacaccctgcactcgtagaatttgtctttgccatatattttctgaagctcactaaaggtggggctaggcatgaaggcttcctcacattcctgattcttacattccacaagataacctctagcatgaatcttccgatgttcagccaaggcggcactcttattgaaggtctctccacagtccttacattcaaaacgtttccctccaacctgacttttctgaacttcactgacagccacactgtggataaaggactcaccatactcatagaggttctctctagtatgcatgatctggtgctcaacaaattctgagatgacactgaacgacctcccacactcatcacatacatatggcattgccccaaaatcaattggctgtgactcggtaaaggagggggagctgaggctgctcaggctgctcacgctcatggcttttctcatctcactaccacattcaaagggcttcttcctgggacagcctttttgatcgtgaatcgagcccttcccatctgtgtcaaaatgatagcgcctctttctttcaagaactctctttctggaaacaagggttgaattaaacctaaagcctcccctaaatgcattcccttcataaacccgctgctggatcactgactccctcttgttcaatgaaatgtccttccagttatcatctgacattctggggaatctctgtgaccggtcgcttgactcccttgctcttcccgatttggaactgcgtgacacatccttgatgaatttttccattatcactccgtgggaagattcatcttcacaaatcccccgccggtgggttgattttttggcttcaggcatagtttttagacctggaaagaaaccccaaatgtaaatactccctagtccccataagaaggacagtgggacttggaggggtgcacccttctgtgatgtttaggaatgcaaagtgtagaagttccttgatagcatctcactggttgtgtggctcctctgtgggatgtgcctcctgcttacctcgactggtgcttgggtaggcacttctcttggatcttgatgagtggccctgcgtcatgtgggagtggccatcgtcttcagcaagctgcactcctggtcacaaggacaatatgatgcctcaaattcaagttgaggaccaagactcatcaccataaattgatcttcatctttcactgagccactaaatatgaggtggcccacatctgattccttggatgtcagaagacatttgctgtctcatttccctactatctattccctaatccattctaatctacatgtaattcttctgactccactcagaaatgtgtacaaagaccccacatgtccctgaaatcagtgcattgtcttttagtcttcaccttcttgtaaccactttttaagtcctcttttccactggccttcttcctcttacctcgcgactgctcttcctccacccactcccttgaggccccatggccttacagacctgcagcacagccaactgcccactaccaacttgggctagatgtcttccaggaaagtccacatgggaactcaggatcccatcctgaatgtctacttaaaaacctccagtgctaccactctggaaaaaagtatcaactcttgtggcaagaagcatctccctgcttgtccccaccctgtacaatgtatctttacccaaagccagaggcatttcttaaaaacacaaattttatcatttactccctcatttgaaatctttcaaagatttcttattacccttgaagtccaaatatattaatgtggactctaacatccagcttaaaaaggagcaagatgacaaaatgctccaatgactggactgggagtgactgagagaagcagctgcttaccgagggagagcagcttcctgtagttttccatgttgtcctggattgtgttgtgaggtttcctgtcctcagcgaggtccaccacattttggtatgattcagcatcctaaaacagcaaacacagacctctcaatggagtctgtccccaccgatgttcaaagacagaataatgttggcaacatgggagttacatatatgaagttatataggaagtgctcacggtattggggttctgagtgatccaagtcaagtgttactagggacctacgtcgtacctaccttggtgctacactctgaggcagatcccaaagacgcatgacacatattccttgccctcatgcagcttataatttggttggagagaaaagactcatgaaacaattagagaacaataaacaataaatcggggtacagatagtaagtgctaaacgggttttgtagagggacagttcagggtgggcctgaacagtgtgcaaaggtttgtggagggcaggtggggccttaagtggtaagtgagattatgacacatatagaaagggattggtgggaaaacttagactaaatatcaaacaggcacggagtactcagggaacagaaagaagacacacacattcaggaagacatctggtcaggatgtgacttaaacctccctcccggtttctccatggcatagcatggctacattgagggagtctccagtttgcacaatttccaaatcacccaggaataactgtaagccctgagggcatttttataattgccttttctgtcttaatggatatttacctaaaaaggaattttaaaattcctcacattactgaggagaaccttctaccaggattctaaaggacctttgcttattgccagagggctgactagaactggtttcagggagtcatggtcccaggaagaatggcactgaggctggagagagacttgaggagggagatggtgctgtgggaagcccacaggctttggagctggacagagatctgggtcaaagaaggattgcaccaattatgagctatgcagccttgggaacggaaatctttttgaacctttctttcaggttcttcacctgtaaaatggggagaagagtatctatctgctttgcaatactgtgggtgaggattttctgcagtgtgatgtcttgcttaaatattaagaaaattatgtaaaggaaatacaaatgtcttgatattaaatctaccatagttctattgctgggaagaggcatggagcaacatgaaaaatgtagcaaaaaaaagaggacttgctgagtaagcaaagacaaagaggtacgggtatctgggtttaagagggaagccttatccatgaactgcctgtgtcctgccacaaaaaagcagaaacaacaacaaaaactaagtagggcaaggaaacacagcagagcttcacagataaaattcttttttcacatgaaagaaaaagcacgctttgattgaaaattaaaatctaggccagtgggcagccctaaattggttgttcgctttgtgtttgtaatcaacaatgacatcttaatgcatacaaactgcaatcaagttcaatggaagagatgctgttctgaaaacaatgctagtatggctcaatgtagttttcacaacatgatctatacatgtgaacaattaagaaatttacacatgaagctaaaagatgagagaattttctgttgtgtacaccttcaaaatgtaatttgtgtcatttgctgctggtgttaccaccatactgagtcagtaggaatcagtagcttccagacttttaattatgcagacatggggctcggatgccaattcttcacacattgtcaaggaagggcatttaaaaagcaaaacaagacaaagcccaactaccaagacaccagtggccaggcccacacatgcctccagccttcttcctatatcccagccacctggcccttggtttggttcccatcccacaactttagctgagctctccctaatgcctggggtcccctcccccaacacctgacccggcgtgctcctggctctaaatggcaactgttaatgcctccaagacatttcccttcaatccaaatcaaggcccttgttacaatttcttgttaactctctatttttccttgaggacactgagaatgatgagcagttatatacaacatttgtgtcaatacttatttgtgcaactgtcaaaagcttctcagggcagggcccctctctgtgttgctcactgctgtgccccccagggcctaggcctgctttctgacatgggatgggtactgatatgtgaaggaaaggaaggctcagcccaatggcttctcccttctttgagtccagtcagtgctggggtcctcctccacactccaccatgtataagtgacccctctcctccttcctaaaaaacaagctcaagttccacattttttttcccttcatgaatctccccggcacatgctgcctcttaaaccacaactgccataattgttaacatttaacggtgtgcctaccatgtgccaggtactttatgtatgtgtgtgagtgacttttcacagcagccctgggagcaatcaccatattcattttacagatgaggaaacttaaattcagcttatgagtaaatggcccaaggccacacagctagcaagtggcagagccaggctttaaacccagctcctgtcagctccagagcctttgtgctccctggccagtctactctgcagacccacagctttcctggctccctcctgaggaccagaaacatctccagagtcactctgcttccctggccctgtagggaacggccaatgtgaccaacctaccaagtgacacacatgctgagggggcaggagctcctctgaccacatgaacgacaaagaaacagccagcagcaacctgggctacttgtcacctaagggatgggcccgggctcctcctggagcgctgggactctcaccccagctggactctagggggcagataaacacaccatctggggaaagaaaggcgtctctgccatgaaatgaagatggcctttctagaaagagaggaaacctgagcatacctgagatcgggactcataagccctggagtccctgtcgtcctctctgtccatttcaaagcttgttttcgccaccacaggaagggaaagatcccgcggaggcatccctgggaagaaaaaaggcatcaacaagaagcagggcccagtccatcctgcaggtcccaggtttgtcccactcaactatgaagccagctggggtgtgagtgtatgagagcaagtgcctttctcttctctgcattctgtggcagcctctgaggagtcccataaaaccagtggccctacaacaacccagacccagggcagggccaggggccctgcctcatccttctgctcccagtctcggaggtggttcagattgtgcccaagctgtgtgggtccaggtacagtgtccactagcctcatccttcgggcacaacctctgggtctccccagctgcaatgtgtgacagggagatggcatcagagaccgtcccacagggtcatggctctgaacaatgcctattgtgttgtgaaccgtcactaaatgtcactcactcctgatatccttctcctgatcaattttagggtgccctgctgcccacagcagtgttctccaagtccaggaagaagaggaaatgatttccagcagtatggacaccaacaatacactggtgtgatgattgattcccttccaaatctcaggcctggtgctcagatgtggcacttccctaacactgcaggaagtcatggcagacattcctagttaacaatattgttacaatgtgtttttcattctcgccttctgcctatggcacttcatactagttttcaatttttgcagtggcatagtctttcatacagaaacttccagtttttttttttttaatgcaccagcttaagaatactgagcaaatagtttaggtggcaacaggtctatgtggtgaaacctgtgctggtggtaccgagtggaacttcaaaaatacgagccttggactaaacttttggggaagcggaatatactccaaatggagcagcagaaacttcgaggccctggcactttccccttgaacctgtgcacagcacatgctctatatctcctactgggaaagaaagtggttaagactcactgcttcttgggttcctggtgtgggaccagcggtctcgtggctccatgtctctgcttctgcccctccggtcccagtcccggtcacctaagcaggtgagacattccagtggttaacaaagctctttgacacacctgttttccctgcatgtgcacaaacacccctctggaaagagatgctaccctcttcccacaaggagatggatccaaaacagagagctccaggttcccaggctcatctggccccttctttatcatatacccgcaacatggtttctgcaggctttgcccaagtggggcttgcttccaagcaagttccaaagctcagtccagtagctaacccccacttcagactctttgctggcttcccagttcctaaggggctgagtccacattcaggagaatggactgcagaccccctactgtctggcagccgatcttaaagtacacgttattctactacaaaaaaaacaaaacccaagaaaacaacacacacaccctccctgaaagcagtgctccctataaaagctcactgaagcatctttaatgaaccttcctgaggaggctgggggtacagctggaagcagcctgttgcaaattccaaatagctttatatactttatcgttgaataaaacggtattaagtatttaaggtgtctgtttagatataaaaatgtctcattatgacatcaattaatttaccctctcctcagatctctgagtgaagctgaccactcggggatggcgggtcatcttcatggaggccccaacccactgtgtctccatctggaagcatctggcagcgcctgcccatgggtgaccagtggggatgggtactcaccactgaaagaatggactgagtgaggtggtgaggactctcttctgttccgggtcatgtcgtcgtcgctggtcacgtcactgttgttgtcgtctaagaggacaccggtcgccaagttactatctctggcccacattctcacaatagttccccccaatccctgagccgcatctccctgtcacagacacacatggttggaatgacctgatcctgacatttctgagttcaaaacccttcagcggcttccaaccactcctggcatactaaaaactgggtggggggagcatggtggctgtgaccaccccgacctcacccccagacacaaacagccagaaggcaacctcctagcacaccacaccaaaaaggcaggagccataggaggttttctcccttctacagaagtgtctcctttccctctcctgactcaggatggtggttctgcactagggaggttttggcgaccaggggatacctgggcatgtgtggagacacttttggtggccacacccagaaaatcatgatgcagctcaatatcccacagtacacaggacatccccaccgctgcccaggacagagagttatccagtccagaccatgtcagaagtgtggaggctgagagccccaggggacacctgaggcctgcactgaccaccaacaccccgtggagactctcaccttctggttggtacatctccttgtaattctccagcagagtgacgagcttctcacagttctccggcttttttgctcgcacccaaggcttgagcttttcagggatgatggtcaggtactgctcaaggaccaagagctcgatgatctcctccttggtgcgggtctccggctgcaaccaatcgaggcagaggtttcggagtttgatcagggtcttccgaggcccaacaaattccacatagattaggttccgaaacctctgatgaaaaaactcagagtcagttggaccttctcctatgatgacatccggctccttagtcaagtcactgtctagctcatacagatttggggcccaggacttcttaggtttggtggcagacaagtgctttggaggcagcatttctctaagtaaaattttcactggaggaaccaaacatgagtcaacaggaaagacgcggcagcctgtgaccgtcagtactcagggacctgtggatcgtaaggagatatacacatgtcccagaagttgaagaccaggcagcagtggaggccaccttaccagaggcatcgacaatgcttttgggatatgggagtccccagtaaataggcaaacaaccgcacaaagttggcctcagcacagcagttacaagcatgacctctgggcttcacagagacctactcgaggagttagctcggctactaacttgggctactaacttgggactgtgggcaacttgtctaatgccctagaagtctctctgtaatctgagaaataagaataacagcacctccatccctttcagaattgtgaagcttaaataaactaagatacctaaaaagacttaactgcccaatgcaaggcacaagagaaatgttcaaggccctagccagtactaaaatcagacgtcagcacgtttattagcaaaaatgaaaaggggaagtaggagttggggcaaatcctcccctaacatttcttcccttaacacaattattaaaacacagtatacaacatgtaaaaaatggaagaccattcaaaaatattaaaagtactcaactctaggtaatatgacattattccctcacacagtgagaagtgaccattgagcctcttgatgctactgcacgttcttttgccttcatcaatcttgacaaaggtctaatctgtctaaaagaaccggctttctgttttgacattcctttcttactgtttctttacttagttcatttatttccttctctttattttattatctgcccccttccattttttaaacttttgagattggacataaatgtaaagattttcaatctctccttttttttatgtaaccaagtaaagctatacatttccttaaagcatttttgctattatttgcattttattgcgtattttaatgactggtcagcacatctggtgcaactaagtaaggcaatatgggaaagaaatctaggtctgggagcataaactacctactggctttacttccagagaagaaaaaaaaccatatgcaacagaaattttctccctttgttttaaaaggaaagcaagtttaaattttttaatttggaaaaagtctaaaggaaaactgaaggtgtttccattattcagagtctctcattagacattatcacttgcaaatcaatgtggtaatcacggtaaactcatgtttactcgtctcagtgatgggctcccacttccctccctatgcaaactgccctcccacgctctctcctgcatattatcatcccatggagcttgggcaccatccaatgcaaatgcctcgatcctgaagaccttagcgactggactatttccttgctgccttccttcataggactgagaaaccacggagagcacaacatagataatgctctgctgggcagaagaatcccaaagcaagggaaggcaacagaccagagagtccaggctccagatgattggtgtgacatttcagacatggtcactctaacccaggacagggcaagagcagaggtctgtgcctgtgagggagacaggcaagggcagacggcccaactctgttatgtggcagacagactcaggagaacactctggtacctgaaatgatactagccctcatcctcaggcaacaagataccctcagatatgtaatcacctgtctgggaacaggatcctttctggaacttcagaccaagcagctatccacaggaacagagtcaaaacacaggtatctgcagaagttttaaaggaagaaatacacagactaagaatatgaaagacatgtagaaggagtgtcagagaattaactccccaaacaactggggactcaaatagcactggggtgatgccttctataccttcggggaaaggccattcccatgctatataaaccatgccagacaggagaaataaaaagctttcaaactgtctttatgaaaccagaacaagtcaaaaacgcaagacaaagatatcactaagaaaccacgaaccaaaactcatgaaagcagaaataaaagtcttaatgctgctattattgaacattattctatgcagttctactcaattacaataagacaagaaaaacacatctgaggcacagagagataaaactaacattcccttatgtaagatctatacacatatatatgcttctattctgtgaatttctctccctaacagacatgaattgaagcataaagtaccctaggtgaaagctatatatcagaatggcaggcttatagagttcaataggaaaccaataatttttttaaagaaaatacaaatagcccaacctgactcaagaagcagagaaaaatatgaccactagggaagaaatctaaaaagctgaaataatgtaaagagcaacttcccaagtaaactttctgtgaataaaatatttaccgtgttataaaaaccattccagagcacagaaaagagatggaggacttcctacaattaattttgtgaccacttgaatgcccatatgtatcttgtcacaaggtggatgccaacttctgtgccaaaaaaaataaaacacattgcttttcctcaagaaattcaggattaaacatacacaatcttcccttaacatgctcaagattttctgaccaggccaatagaacttggcccttggtcaatagaagccattgaaaaatggaagttatttttttaacagaaaaaccttaaaaaaaaaaatcagatctgagctacttcccaccatggcagaggaaactcatttgggagtaaagaaaggctttggaaacaaaacaatcaatcataaagccgggcaacatatgtttgtatgcacgggaagaaacaagtacactcatatactgcctgtggcaatgcaaattttatcaaaattaaaagtgcacatatcctcctctcctacaaattctacttctatgaatttacctcagagatatgtaatgacctatgtgcaagaatatattcattgaagtgttgttaatagacaagatatgttatgtttgtataatgaattactatgaaaccctttaaaataaggcaactctaaataaatgagtatgaaatgatctccaagatagttaagtgcaaaaccggacacagcactgtatacagcattctcagaaactaaaaaaagatgtgcttagacagatgatttctagaaggatatataagagactattaatgatgactaatcgcaattgcctctggggaagggaactaggggtcaggaaagggagggcaacttactttttcattgtatattctccttttgttttttgtttttatttttattttaccatgagcatgtattacctagtcaaaaaaataaattcaaagttaaaacaaaacaataaacaaaactaccagtagaggcctttagaggttgtgctactcacagagcaggtgcaggcagccgtaacatctttacactgatgctgagcccaggctctccccgcatcgcctccctatcaccatccacagcttgaatccatagtcataccctaacctggccattagcaggtacatgaaagtcaatttagaaaaccctaaagaatcaactttgaaacctgttagacccaataaatacttatgatattgcagttgcaatctgaatatacccctcaattacacccaacaactgtcagtacataaatacaatgccatcccctatcttggcaattccacttctgaaatctaactcacagacccatctgcccatgtgcacaaagatatacagttcaaaagtgtgttcacagaagcactgtttacaacagcagagaacagggacagtcaaacaaatgctcaagcgtaattccaatggcagagaccactgaaaggccaccacgtgggagacaggaaaataaagatgggtccaacttttctgcactataaaaaccaaccaaaataaaaaccaagcaaaaagggagggggaaaagtattttataacacagatgacagttaatgtttgaaatgtaaaaggcttttggcattaggaaaaatagcccaatatgaaaataaacaacactaatacacagagttcctaaaattagtgataataaaggccggttacttaacatcaaaaatcaaagaaatgtaaaatattacaataaaccttttttgacctgtcgaatgggcaaatgtttaaaagatgaaaattgatgctagtgagggtgtagagaagctagctggtgcaggcatgaaccacatttctggatcccattttggccactgtttaaagatactaaaaaaaacacctacttcttttgaaccagcaattctccatttaagaacaaatatagccaagtagataaaatgataataagaaaaaaaagctaaaaagtcagctgcagctgggcgcagtggctcacgcctgtaatcccagcactttgggaggccgaggcgggtagattacctgaggtcaggagttcgagaccagcctggccaacgtggtgaaactccatctctactaaaaatacaaaaattagctgggcgtggtggcagtaatcccagctactcaggaggctgaggcaggagaatcacttggacccaggaggcagaggttgcagtgagccaaaatcgcaccactgcgctccagcctgggcaacagagcgagactccatctcaaaaaaaaaaaaaaaaaagtcagctgcacactatggtttaacctttgtatgtacagctaatttctggtttgtaaaaggtaaaaccttgaacacaaaataatggcaggtaacacattttacacatggaatggtgggaagggacgagcaccactgacagggaaacgtgttctgttgtgttactgctatgtaaccacagtcctaacacaagtcacattagagcaacccagagccaaaggcaggaagaggaagtgctggtcaaccttctcctgcagggctacctgacacaaggtgggccatatgcaatgaggttagctgccttcctggccgagtggcccaacccttagccttggattcaacccgtcctctacttgctgcccaaagggcaactagcagtggggccagatgctgaaatttgcacctgccagggccacatacttacctcaccctgactggggaagaccagatcccacgtgaccttctgtgacagcgagtctggccaatcaaaagcataactgctctgcccacttggcccccacttccccaggccagcttctccatggcaacagccacgcctaccactgaagaaaacagaagatacgtgtttgcaggtgctgagaggaagaaaggtctaaaggcttgcctgatgctatcaaatgaaatattaaagctgaggagttaatctgcctgaggatggcctaaacgggccatcaataaaaacgtagcttattaatcagagctgtgcttgaagatgtatgaatccaacagaacaacagagcacctgtatttataccctaccgcaaggctccatgggcaaagactctgttacctttttcatctctatatttttataggtgttcaataaacattatttgcatatagatgcaaaaacatttaataaacccaaactaacaaagtccaaataatagcccatgatcttgaaaggctattccaggaatacaaggaggatgtcccatcagggtaaactgttacataaaggatgaaaggggaaggggagcccacaagcagtatttcaagttaaaaaacatttgcaaacttcaacagcctttcctcataaattcttagcagagtaaaagcaggagaccatctaagcattataaagacttatctcaaatacatgcaaacaagcatgttattaaacattaaagatgttcctctggaagtggggacaaggaagggacagctataccacaactacaatttaacatgaccctggaagtcctagctagtgcaactgaagaaaaagaaaagtataaatatggggcaagcattattttgaactacaaaaccttatgagtaaatacagcaagagaaataattcccattaatagcaaaacaaataaataaatctccataaataaatttaacaaagttacctgcaacttcaaacaaaatttcaaaaatttacagaaggaacacaaaaattagccgggtgtggtggcatgagcctgtaatccaaactactcaagaggctgatgcaggggggccctgggaggtggagggggcagtgggctaagatcatgcccctgcattccagcctgggtgacagaactagactgaatcaccaaaaaaataaaaaacaataaaaaataaaataaaataaaataaatgacagaagggcaataagtctgaaataaatacataaagacacgtgtatcacatttaaaaagctcctttttattttgaggtggggagttttgacaaactgataatccagttcttctggaagaataaatgtacaagaatatcaagacaaccctgcataaggtctatttggagtgggaggtggtttgtctgtaaaatgactccaacacacaaaaataaagtgttttttccaatataaggatataagcactaggacaaatataccactgggacataacagagtccagaattcaactgtgtaaaagtctatagacacatggggacttaatttataataaaggactggaaatggattccttatttaaatataaactaggaactttcttacagctaaatggcaaaggataactttaacaaaaaggccatgacaggaccgctaatacctcagtgtttggttactcaagcatgcatttctagaattagggttggcctttgacgttaggaaaggccaatataaccactgctggcatggagcctcccctaagaaattaggtatttcagctacacatctctggaaggctaaggccactagggccagtgacaaacatactttgttctaagtaagttactgcatccaaaaatcagcatctctcctgagttttcattaaacaaggaatgaaaacaaagtatttagcaaaatgttacataaccattaagtcgtgttgtcaaggaatgttacagctttattttctgattataaaaataaaacacagcactacatgcaggtattgcaaaacattcaccatagaaactgcaagccacacccactggttaactttgttgctattaataaatcttaaaatctatacttatgttgttcttactgcaaatattcccatttacgtgtacacagagaatgagaatgtccacacaatggaatataatgcagttttcagaaagcaaagctatagatggagaccttgagtgtgaactgtttaataaatggcatgatctcatgtatgtaaaaaataatcaaacatatggcagtacatacaaactaaactggaagaaaactcacataaacttgtattaagactattcataaaatagaggaaatctatcagaataaatgattaataataacaagtctctgtttctttttccatctctatttaaaatgttattttaacttcgcaatcaggaaaaaaactgaatataaaaatgtaagtaaatgcaattactgtttcctagcgtgtttgttttccttcctgcccagcttgttacagcacatcaggccctgccctttctctgctgggttccccataatacaatctccctctgacccttaagcactcccaccgacagtaccctgtggtcaccatctgtacctcccctctccagtgactgtaccacagagggggctaacacgcatcaagctccacacccaaatcctcacttcattgacagctgtctagccgtcatatggctcaagactgaactctggcccacagggcaaacccatatccttcctggcttgaaggtgggctcccacacacccctcattactaaagcttccatatctccctctgctctctcttcagagcaggactcagtgttaagtagtagccaacagcagttaggggcacacaagggctagctgactctgggccaggggacaaagaaaggtcaccaacttcaaggggagggaggagaggcgccaagtgatggggccactaataaaggatccctctacacagccaggcaggaagggtgcttctgggagtctggcgttctttgatctccaaaggatgttttctttacactagatgtctaaacatgaaacctctctgtatacagaacaagcctggcgctgcctgctgcatgacagcattgccattgaagtctggatggtggtactgatgccattctttggatattttatgacactttacttctattccattaaaatgagtaggaaataaaagcatggctcttacaattaatataacacataataaagatgaaactcatcaggcatccttgccagaagtcagggaagatccatggctttaatcagagaaatgatgggtcagtgttcaactgagcagggaagaacttaatgaaagaacacatcatgcactagaaagcgtctgggaccatgtgtgagaagaaatcctgtgactccggtttggcctcaggctcccacatcccatctgatgcaggagaaaatccaccgagtctccttcagtcccatttctatttacttactttggtccctcaccatggtgcacctagattcagccccctaactcgttctacctacctcattaaaagggggctggaattgagaactttaaagtcaggaaccgaggaggttactctcttcgtctcccagggacagcgtggtgtgtggtctcgtctctcttcttgtttgctccattctcctgcctctctctgcagaccgacattctctacttcagcacgcacatggagtaagatgctgtcccagcccaggcctacgtcacctcccagtttaaatgcccgacactcagtgtcccttcatccaaattctcagtattaaagtgcatgctacagcctgattccttctagggcagtggttctcaaactcagatgtgcagaagagttgcctagggtgcttatgaaatacggagctacctttccaggtgggatgactcaggaggtctgtggttccccaggaaagaagcattcctacaatcactccaggagctgttctttgagaaccactgctctaaggtatccagtctggtccaatcacctatgaataaggtacatatgggacatagggactttagagggaaaattttatataggagcaaggagtaaatgaccaccaactccatctcacaggccacaacctccaccctctggtctgttggctggcttctctcagataatctcaacatcctgggcttatttctaccacattaagcttagcacttaccacactgcagcaaaatctccttgttgttgtccatccttgagagatttccccaaaagtttagaaagagaggaaataatatctaagagttcagtcttatgaccagcacaaaatggttcaagacaaataaagctactttaaagagacaaaatgtcttccagaacagtatgagttatttgactatattctaataacaataattggctcatctgatttttttaaggggagggagtactaaaaagtaggccacaaagcttggtccatccaaccatctacaggatagtgaacaactctcatcagacctaacttgaatggagtttggggaggacaagggtgttagataaggggcttccgatatcttggtaaccctaagcaagggtttcactgtgacaacatggctgtaccaggctatgtgacaaaccagcgctattaaagctcacccacatcctcttggttctgattccgtactcaccaagcaaccttctcattatggttgtgtttcccatgtaggtctgcctacagggagagaatttgctgatcatacacactgctgagtacttgggtccctgctattgtactcctaccatgaattaataaaccagaattgtgggaacaggaacatcctatttcaagtcacatgtcagtacggttttaagtctcctgagcttagttaaatgtggatctaccaacatgagccctcgggcaaaggaggtttccaagtctccacagggttaagcaccataatgcatatcttgagcactgaggccaggaatacaccaacccatcccaagggctcacctggtcatgtcagcttctccctaagcagtattccaccaccaccatagccacctatcttggtaaacacattcttactcttcttgtgatgggagtttccattcagtagacactgaggccagggattatgtcattcacttctggagactctaagcctggcatgatcctgtcctggatcaggcccagtatcaatgcttgctaacaaatgaacaaacagacaacctctagctatgtgcttgcttccccacatcatgtgactcactgtgcctcctctgaatcagtcagcaggccatgaacagagaaagtgaggagtctccctcctcaacacctctcaaataatctacccacttcactcctccctgtgatatgaccacaaaccaagccaccatctctcacccaggcccaagttggtctccccacacccactgcgtccaccctccccttctgcaccctgaaaccagatgatctttttaaaaccacaaatctgattatcatgatactcccatggttaaaagcacttcccgctgcacttaaggtcaagcccagttactcaccacagattacaagtcttttcacaatgaaaccacaacttaccttcttcctacctcaatcagatgccactcaacgattcccttgctctaggaatcctggattttcagctcctctctctgcatctctcaacaacaaccctatcccctctgctgagactactctccccatgacacacaccattcacactccttcagggctcagctttaatgttctttaccatctcagggaggcccctatgtggcctctctaagattaagtcagctgttgctagcagatgttctcttgcaaaagtataaatcaaacaattatgttttccacagctttaattcccaaatagactaaaaactctttgaaaacacttcctttcccccattggggctatgtcccagtacctggcacaaagtacacacttgatcaatattcacaaatgagtggatgaatctctcatgcttctttaatcaccaggcaagagaaaaagagtagccctgaaggagtagctgagtatgagaaaaagagggaggatactgaaatggatggtgtgaggccaaggagaatttttagagaatacacaatccaccagaagagtctgggtgttctcagagggcacaaatggtgctggggtggctatgtggaacacatatgcagtaggaaagtgtcagagtaaggaagtgcggtggtcactccaaagatgaatgtggcactgtgaggaggaaattcaactcacctggacccagccacctagcgtttggacctagtccctcttcctctcgccagtcgtctccaagaaggacggaagatcaagaaggcaaagctgtagaggaaaagaaaatgtgagacgccaagtttattttgcagttactgggttcctcaggggggaacaataccacaacagttccacatttatcttctatgatggcacaggtcaaatgagaccatgaaaagcatcccatccaggatgaatggccacgggtatagctcccttagaccacctcacaccctgggatgtactcatagactttctccaacaaggttacatcaaaggcattcaagtcaatttctggggtgtcttacaaccttctctggggctctagattaaggaatcaattcaagaaccccatttttggcgctggccgtccccatgttaggaccgctatcctatcgttattattaggtaatagtaccctttatcacgtaaaatattttagggtttatcaacatgttctcagtggactaataggacatagtccaagtcccactgcacctcagagtatgtgttcaatcaattagaggtccctgggggaaggaccttcatgattatgagactggtttatattccaagagtcaggtgggcatattttggtgaggttaaagagcttattaaaaactattcaaaggatgggcgcagtgactcgcgcctgtaatcccagcactttgggaggccaaggcgggcagatcacctgaggtcaggagttcgagaccaccctggccaaaatggcgaaacccctggtctactaaaaatataaaattagatgggcatggtggcgcgcgcctgtattcccagctactctgaagaggctggggtgggagaatcacttgaacccgggaggcagaggctgcagtgagccaagatcacgccaccacactccagcctgggtgagagggccagactctgtctcaaaaaaaaaaaaaaaaaaaaaaaaaaaaaaaaaattatgacaggctaggaaggaagcgtcatatgtgtcactttccctacctcaaacaaaacaaaagggctgacttaagatctccttgggtggagccagggctaggtaagtgagctctaggactccgtaggagagctagggctgggagggccacacccaaacgaactaagctttggaagctgggcagccctctagcggctctgctcatgaacagtttctccagaggccccaccctacctatggggcagcccctttaaacacacccccacctgcccagggcagcctcctagttcccatgcactgcccctctcaggaccacccgcagccctgaatttttccacctccagctgtacgattttgagtgaaaatccttcaccaacagagtctccaaatcacctagaccccaaatcttacacccacagcccacttcctccattttctcacttaaaatcccacctttccccaaatctcttaaaacgtctgagtttggccttggattccacttttctgctcactgacccaaggctgcacagctgaacccgcccgcttcccgaggcctggctttggcgccccctggaggaagtaaggcgccaccagccatgagggcacgctgcccaagatagcgggggtagggctcagctggcacgccagtgcagcccgcggtcactcaggaaggctccagtgcaggccccacccatgaaccggcaaagatggcacagaatgaatgaacacggctctacggccctgcctaccttgaaatcccctcagccccctccaacagccctgctgtcactcaagatggcgcctgcgcagtacacctctgctgcccccgccaccggccaacacacgtggtactaggatggacggggctcacgctcactcctacagcgcagctgtcattcagtaatggtgcctccgcactgcacccgccacattgaatgccggctgctctatcagacaagacacacatgctatggcccccctcagtcactcaagacaaagcagaccctccctcagaaccgcacctgcagccagcccagctgtcattcaggatggcacctgcacagtacaccgtggctgccacctaatggccagcaaagatgatgccacagagtgggcggggccatgcagaccccgtcagtcactcagtcctctgcacccggccctacagccaacccagcagtcattcaaaccagtgcctgtgtaactgccctcacgtgccccattacagccaaagattgcaccacagtggaccaggctcggcagcccctagtcactgagaaagccctccctcatgcccgcccctggggccgacccaggtgtcactcaagatggcgcctgcgcaatcaacctcgggcgccaccctgtggctagcacagacagtaccgtagaggcggtgaggggcagtggaggtgagggtgctctcagccctatcagtcccgaggaacggtcccgggccccagcccttagccccgccagcagggcgcctgcacaacccgcctcgcagctcccccactaagccgcccccatacacaagatggaaccacacgcatcctgtggtgaacaaagtcttggtcaggcaacaacaggggaaggggtgagcctctgccaccgttagccaaaaacacagcgagcgcggtgataacccgtcaccctgtccttaagcataaatggctccgcggccgctaaggcaaactctttaggcacgtctcccggctcccccagatgcggggactgagccagtcccactggcaaaacagcctggcgaccagcacacacagcccaaggagcgcggcactccacagctttccatcaccgcaaggcaggcaagcacagcaaccgtggccccgcccctccctgtggacaaccccacacctatgcggcaaaccgcagccgccccgatcaaagatggcacccaggtgggcggggcttgaacagaccgtcccgcccatgccacctgcagccacttcagccttgccccgccgcatctgccgccaaccaatccgggcaacgcctgcgcggcaaacctcagctgcccccatcaaagatggcgcccaggcgggcgggccttgtctcgcccaaccaactaggacagcgcctgcgcagcaaatctcaagcactttcattaaagatggcgcccaggtgggtggggcttgaacaaaccactaggtccaatgccaccctgtcacttcagccttgccccgccccatctgccaccaaccaaccaggacagcacctgcgcagcaaactccagcagcccccatcaaacatggcatctaggtgggcggggcctgagcagatcgtcatatccaatgctacacagtcacttcagccttgccccgccccctctgctaccaaccaaccagggcagcacctgcacagcaaacctcagcagcccccatcaaacatggcgtccaagcgggcagggcctgaacagatcgtcacatctaatgctacccagtcacttcagccttgccccgccccatatgccaccaaccaaccaggggagcacctgcgcagcaaacctcagcagcccccatcaaacatggcgtcaaagcgggcggggcctgagtggatagttacccaatcacttcagccttgccccgccccacttgccgccaatcaactagaacagcgcctactcggcaaacctcagccaccctcataaaagatggcacccaatgggtggggctggaacagaccattacatccaatgcaacccacagtcattcagctttgcctcgccccatctgccaccaatcaaccagaacagcgcctgcgcggcaaacctcagccaccctcataaaagatggcacccagtgggtggggcttgagcagacgattacgtccaatgccacccagtcacttgagccttgccccgccccatctgccgccaaccaaccaaggcagctcctgcgcagcaagcctcagccgcccttatttaagataccgcccgagagggcggggaaagaaaacccctacaggcaggacagcccttcgcccctcccaccaccactgcggcaaacaagccccgcccccagagggtagccgggcacgccggcgccgcgaggccgatggcaccccgcaggaaggggcattttcgcagcccccagacccagcccaggaggcccagggctcccgagagccgcattccgccgtggcaacagggatagcattggtgtcgaccttgctggacttgccgtggcagagcccccggctgtctgccctaatgcccccggtttgctgcggtggcccccggccagtcagaaaggcgcggagaccctgcagcagcccctcagaccccggactgcaagatggcggcaccaacgcagcagcccgggctgcgcccacccctgccccaaaaaggcaccaaccatccacagcctggccgccactgtgcccactctcggactgggcagcgggcggccaagtaccatgtccgccagcccgccctgccacaagggtcgctggcttgccgcggggtcttgggcttgcggcaagacggccactctggcccagagccgtcgcgacaccaaggtcccgcgggcaggaggcgcgcggggcggccgaaggcgcactcacctcacctcagtgctgcgcagcctcgggcacgaacagccgcctagcgcaccctcatggcgcccggcgcccggcggcgccaccagcccagggtggacatctcccgcgcctcccaaacctctcctcccgcagctgcccagacttctgcaccgaggtgcagctcgacgcctccttgtcagggcttctccgcagaggcggggcttctgtgctagccaatcagcagcctcaccgccctctccgggccccctcaccacagccctgtgacgtgccaatcaggctgcggttgccacagcaacagtttggcgcgaaggctgggggctgacgtcagggagtggccgtgagggaccccaaagccaggtctggaaaaggggggtgggttgggtggtgggggtgcagcccccaaagaaatgggggtcgaaatggaggaaaccccactgagatgctcaaatgtaaaaccgctgaagaataaagggacaaatgtacacatctgtctaaatgaaaaaaatgaaaatcctggccgcaaaaacacatacattaacgtctaaagacctgcagggaagacaagacttttccgcctgggacacatgaaagacatcgagctaatttccttaataaatgaagagctcttggaaaccaacgagataaagaccaaaccaagacagaaaaatgggcaaaagggataaaactggcaattcgcaagaaaatccaaacggctggccgacctgcgaaggaaacatcacgacctgtttgcataaagaaatgcaaacctgaaacaccgggcacgtgcggtttaggggagcgggcagtctcacacactactgagttgtttcccagcagccgtcaatacagaccttccactgcgtaagcccactgcattgccatttaataaaacagcaagaaaatgagagagaaaaataatgaggtagaattgtatgggattattaaggattgaattctcagtagatttagtgaaatatacaagttactgaagtttgtagaaacgaactggtaagtgttttctcatttatttgttttttaaggataaacccaaatataggtaaaactgttggaaaggtaggcaagaaattgttgatgagttacttctagggacaaggaatgtggggtggaagagggatttttcccttctgccatccatactgtgaatttccttggcagaaatacgtatttcttctctggcagtaaaatcaatgaattactaaaagttcactaatgtactctttggtccaactattccactctcaaggaactaaaaaagcaaaggaaatacagggatatacagaagattctatacagggatattcacggagcatcatttttatcaccaaaaatgtgctccacagaaaagaattaaactgtattctggtaaatttacacagcgcgattttaactgactaataaaaatgctgtatgattttaactttaaaggaaaaaatctgtaagatgtggttaattaccaaaaggtgtttacctaaggagcacacagactttaataccccaaattaaactttatattatactcaaggagttatcagtggttgcttgctacactgagaagctgctttatgtgttttagactccctagaccatcaacagtctctttttgcccagcagtgccacataaacataatatacgaatgaaaacactgtgcttcttatgaaaatacacgttcaaaacaaattccccagcaggaatattgaaggtgaatgtggtagtaccctgacttaggttacagattttcaaatctggctactctcattaggctcacctggagagctgttaaacaatgcagattcccagtgtcccacagagatctttgtttttcaggttcccaagggatcctaatgtctagttaaggttttgtaggtgattttaatatattttaaagactccatcatccccctgtctcctcaaaggcctctatctgcaataccagtttctctccggatcctgaatcattaatttccacaagacaccacatgctctcagagctcctgcagttaccacccccttgctcagcacctcttggccctgaaaatgcctcttgatagagcagtctactgtcactaactcaatggttttaccatacattctctcctgctaacatatatgccccacaggcttccatcccttccaaacccactgaaattgcttgacaatttcagcaattccttatgtggccaagaaacttgctcttaatctcactttatctctcagtaatattcaacatcctcattaaaacaagcaaacaaaaacaaaatcccatgcatgctatcttatttttggtgacaattacatggtcctggtttccgctcccctgccatcagtggtctcttctcagtcataaatggcttctgctctgcttgccatctacacgctggagggtcttgcctcagaacttagtcactagtcttctccatcaatgtccactccctaggtaacaacccttccctcctcacctagtcacataatttaaatgccacctacatgccaatggctcccaaattccaatcctctgccacaggactgtccacaaaagcgcagtcttttgcttagaaactgactgctccccttggatgtctatcaggcaactcaaagcattttaaacaaatattaatttcccctttccccatttctataaacagtaccagttgctgaagccaaaaaacaaaaacaaaaaacgacaaaaaaaaccctcacgattgttctcgttccttttttccttaccaccaacatccaatttatcagcaagtcttgctgaccctatctaaggcaaatcccaaatttgtcccatgatttccctttccatggtagtcctaagaaacattatcttcctacaaaaacccttcttccattccaaacccttcctccagtattctccacacagtattaagggtgatcttgcaaagcaaaaaagatgtcaatgttccagcttgaatgacctcctgcccccatcccaattgcatttaaagtccaaaagcccaaaattagaagagccaacattatcttttgtcttagaggacaattaaatataggtgttgtaaaatttcacaatctcttccttcaatgcctaatttaagaaattcttccccacactgatgtcataaagatattcaaatagctgtgcattttagttttctttatggttatttttgcctatgttctgtgttagggatctaattttcccctgactttgtatcatatttctctatatgagcaggtctgtgcttgaactctcttgttggtcccctgatccatttctctatctctgtgcattaacgcaccatattattacagctttacagtatcttggtatttgaaagggcgacggccctaccttgtttttcaaaagtgtctggccctaccttgtctttcaaaattatctgactcttagcccaccatctttcaaataatttttagaagcagcttttaaagtttgatgaactatcctattgagattctgacattttattaaatccacacagcaatttagagaaattgaaaacattatatcaagatctctcatctttgaccactgtctatatctcttacggctgtcaatgatacactgtaattttttttccctataaaggccttatttgactttaggaggtcctttttttcccccattaattgtataattggttatttaatagtttcagaattacaaaaaagttgcaaagatagtacaaaacttccccaccctgttttccctgatgttaataccttacataaccttgctactttgtcaaaaagaagagataatattaacactaaacaaactacagactttgttttgatttcacccatttttccattactatcttccttctgttccaggatctcatcccagacacagcattacatttagtgattacatctccttaggctccccaaggctgtgacagcttctcagtattttgtagaatactcagtttgtttgatattttctcacaacttgatttgggttatgaatttttgagaagagtatctgctattgcctttttttttttttttttttttttttgagacagagtccggctgtgtcgcccaggctggcgatgcaatggctcaatctcagctcactgcaacctccacctcccgggttcaagcaattctcctccctcagcctcctgggtagctgggattacaatcatttgccatcatgcccagctaatttttgtatttttagtagcgatggagtttcaccatgttggccaggctggtctcgaactcctgaccttgtgatcagcataccctggtctcccaaagtgctgggattacaccgcacccggcctgctattgctttttatacgctgactttggatccagtgaacttgttgactttttttttctacacaaaaaaaagttcctgtatttttaaaatgttaacatgctaattaatgacttcatttttactttcggagtttcaccatgttggccaggctggtctcgaactcctgaccttgtgatcagcataccctggtctcccaaagtgctgggattacactgcacccggcctgctattgctttttatacgctgactttggatccagtgaacttgttgacttttttttctacagaaaaaaatgttcctgtatttttaaaatattaacatgctaattaatgacttcatttttactctcattgacaatcatacctcacttcattaacataatgcattggctaggacttctggggtgatattgaacaagtcttgtcctatatttgaaaggggatactcttatctttactatgaaaggggatactcttatctttactatgaagtaaaaacattcactgcaggcttgttttgtacagcctctttattgggggttaaggaaattgccttaagttctagttttttaaaaaaatttatcataagtttaattttatataatgacttctctgcattcattgggaagattgtattatttaacatcatctgatgattggtgaataaagcaggttttatgttgaaaactgtattcctaaaccctgcttgatcatgattatgtgtatctgattcgtatacacatgcagctgggtactactgagttatacttttttattacactatccttgtctggttttgctaccaaggttgtaacagccttatagaatgatttggattgttatctcacttcttatattctctaccatagtttataaactcctctccattggaaattatgtccctttttctattactaatattattaatctctccatgtttctccatcagttttgctaaagatttgacagttttgtctttttaaaatgacttgattttgttgaccatattcttccttcttttccatgtaattaatttctgttctttttgtagttctttcttgttcagttctgtatttcattgtttccattagatttcctctttgcgacatgaagaaacgtctttaggggtcaaagatcttggggaaaaaaactatcttttgaatacagatttccaaattaattgcattatactcatatagcatggcccatatgctactatttcacatttgtcaaagcatccttggtgatcttaagatatggttaattttaattgttcaatatattagaaaagaatgagtattgtctaattgttaggtatcaatttctatttatgttcataggatcaacttgttaactgtgttcagatttttagtattcttggtaattttttgtctgcctgatctatctgttctagatataataaaatctcccaatattcctatggttttatccaccactccttataattaatagtttttgctttatatatatatatttcaaggctatgtttttaggtgcaaacaaggccatgactctttgttgagaaacacagggaagttaatctgcttacatttttaattattgatgtatttgtttaatatgcttttggtcatttattttctcctttcctgcattctactaaattgatcaagttttctttagtcccctttcttccttctgcttatttgggaggtttcaattatatttattacttcactgtctatctttaagttcctaatttctacataagcatatatttttttaacagactataaagtactaaagcaaacatgttggcacacgttagcaattcactggatttcccattcccaccttcattaatattgtctagaattttaattatacctgttttaaacaaatgaaaacatttttacagtcaatgattaattatatttactggtatttcaagaatttattcactcattcttgtttcttgaatctcactcctcgtccctcgaggtttactttttctcattgcaataaatccttaaatgtgtctttaaataagtgtataaggtagtctatttgtatttctaaaaatgtctttatgagacatttttgaatgacattttagccaggtatggaattcttaggtaacctttatcttctctccttattttgaagatattattccattgtcttctaacaaacctgatgaggaggtctgcatcagcgtaatgttcctttctaataacgtctagtttttcccgcggtagctttcagaatagatgttatgtatagatttttgtttatcctgctcaggattgatgtgaccaatgaaggtctttcttccattctggagaattcttgggccagtgtttctttaaatagaacttttctgccattccatttctactcttttcaacctataaagtataatgacccgtcttaatccatcctccatttgtctcaatctttctgtttttcatactgttttctgtgctttctgagtaacttctctttttaactgcatctggtaatagcatttccctagatgttttaaatacagtaactatgttttctgttctatgatttccaattggtactttttttatatctacctttctcaaatggatgaacattttatggacactattctttatttcttcaaaaatcgtaaagtcacactaacactatttgaattgcattttgaaaggactgaattcatgtcttgattgctagttttgctgtcttgttcattttaagatttcctaactttaacccagtgctttgcaagtttagtttctaagtgtttttcctatgggttatcttttcccctcctctctgaacttttcttccctccatgtctttttggctgtctctacctcacccatgagaagcacagtccagagacaatcttgtattgtcaactggggattttgtgccatgtgacaaaaggggtgtattagtcactgagcaagattaaagcttaggctgggtcctctctgcatggctttgttttttcaccccctgccaccactcgtaagtaaaaaacctgggtatccatcactgtttgttgttgttgttgtttttccaggctccttttatgtcaggagagtccaaatccagtacctgtttgccacaatgagcctgggacctcaacatgcatggagtgcttccggacctcattacccaagagcagtcagatttttaatttcctctgcctttttcaagatcattagttcagaaggtttatgttttcaattccacatatccttgcatttttctttcaagttttgacccatatggatatcttaaatattcctattattgcaagtttatattaaaaggaggttaaattgtgaactcacaaactcatagcatcatagcaccatctcaatcaaaagtattatcttctgtgaactacaacagttttcacttctttcgcaagtgtggagtgacgtttgcctgaggctgtatgacctgtgatatcatgacaaattgaaggccaaagcagatgcgaatccagctgttttctattaagtcaaatgccaaggagatttacaaagatgtaaaataatgcgcctcttctcaataacctttggttttgaaaattgttatttttcataaaaaatgttgcttccattaacctgtaataggtttactaccattattttaaataaaatacacatttcaaatggcttaattttttcttaagatataattgataagtaaaaattgtatatatagtgtacaacatggtgtttcaatatacatatacattgtaaaaggatatcaagctaattaacatatctatcacctcactatttttgtgtgtgaagaacacttaagatctactctgttagcaattttcaagtataaactatagtcaccatactgtgcaacagatcaccaggactttttaatcccatctaaccgaaattttgcaccctttggccaacatcagctcatctcctctgacccctgacaaccaccattctactctctacttgtatgagttcaacttttttagattccaaatataaatgagatcatgcagtgtttgtcttaccgtaatgtcctccaggtttatccatgttgtcataagtgacagcatttccttctttttaaaggctggaaaagtatgccattgtacatatattcattttatttatccattcatcaatccatggacaattaggttgattccacatcttggctaatgtgaataatgctgcaatgaacatagaagtgtatactgattttgtttagatatgtagccagaagtgagattgctgggtcatacggtagttttactttttttaaatgaatttccatactgttttccataatggctatattaatttacgttcccaccaacaatgtacacaggttccctttctccatatctttgccaacacttgaagctttttagtttgattcaatcccttttgtctatttttgctttttctgcctgtgcttttaaagtcttatccaaaaatcattggtcagaccaatgacaagaagtttcttccgttacgttttctcccattagtttcacagtttcagctcttaagtctttaatccattttgagttgattttgtaatatggtgtgtctaatttcattccttcatatatggatatctagttttccccacccacttatttaaaaaaaagtcctttccctgttgtgtgttcttgacacttttgtcaaagattgactgactataaattacgggatctatttctgggctattttgttctattggtctctatgtctggttttatgccagtatcatgctgtttttattactgtagctttatactcaattttgaaatcaggtagtgtgatgcctttccagctttgttctttttgctgaaagtttggttatttggggtattctgtggtttcttatgagttttaggagtatttttctatttctgtgaaaaatgacactggaatttttttatggaaattgcgctgaatctacacatcactttgggtagtatggagattttaacaatagtttctaatccatgaacaccagatatttttctatttgtgtcttcaacttctttcatcaaagtcttatagttttcagtgaacaggttaattttattttattatattatatatattataaattctggttaaatttattcttaaataatttgatggtactgtaataatttgatggtactgtaaatggaattgttttcttgatttctttttcagatggtagtagtacctggaaacaatattggtttttactgcaactttactgaatttgtttattagtttaacaagtttttggtggcatctttagggtcttctatatataagaccacatcatcagcagagacaatttcacttcttctgttcgaatttgtatgcctttcgtttttccttatcttgctcctgatcttaaaggaaaacctttctgtcttctaccactgatagtgatgttagctgtgggcctgtcatatatgacctttaatatttcgaggtatgtgccttctatacataatttgttgagtttttatcatgaaaggaagttaaattttgtcagatgctttttctgcatcaattgaaattatcacattttctatgcttaattttgttaatgtggtgtatcacatttacttatttgtgtatgttgaaccatccttacatcccagtgattaatctcacttaatcatagcgtatgatcctttcaatgagctgttgaatttagtttgctagttattgtgttaaggatttttgcgtgtatgctcatcagagatattggcctgtaattttctatttttgtagtgtctttgcctggctgtggtatcagggtaatgctgacctcataaaatgagtttaaaagttttccctcctctttaatttttggaagagtttgagatggctgggtgttaattcttccttaaatatttggtagaattcaccagtgaagcaatcaggtaccaggcttttctttgttgggaggtttttgattatagattcaatctccttactctttattgatctgctcagaacttctatttcttcatgattcagttttggtagcttgtatgtttctaataatttgttcacttctaggttatccaatttgttggtgcatacttgttcatagtagtatcttatgatcctttgcatttctgtgctatgtctcctcttccatttataattttataatttataatttattttataatttataatttataattttataattttgagttttttcttagcctagctaaaggtttgtcaattttatcttttcaaaaaaccagatttcactattatgatcatagtttcgttgattttttctattgtttttctattctctatttcatttatttttgctctgatctttatctttccctctttctctagattttgggcttaatttgttcatctttttctagtttcttgaggtgtaaagttaggttctttgagatctttgtttttcttaatatagaatttaacactataaacttcccttttagaattgctttctctgcatcccacgttctggcatgttgtgtttccattttcatttgtctcaagatattttttatttcccttatgattttttctttgacctactggttgttcaggagtgagtgtgttaatttccacatgttgttttccaattttcctcattattgatttctagtttcataccattatagtcagaaaagatacttcatatagacatcaatcttcttaaatttgttaaggcttgttttgtggcctaacatatgatttgtcctggagaatgttccttgtgtgcttgaaaagaatgtatattcttctgcagttagatggaatgttctgtatatgtgtgaggtccatttggcctacagtattgttcaaatcttattgttttctgcttactctatacattactaaaagtgaggtactgatgtggtttcgctctgtgtccctatccaaatcacatcttgtggctcccacaattcccaagtgctgtgggagggacccagtgggagatagctgaatcttgggggcaggtctttcccatgctgttctcatgatggtaaataagtctcacaagatctgatggttttgaaaatggtagtttctctgcacaagttctctttgcctgccaccatccacataagacttgacttgttcctccttgccttctgacatgattgtgaggcctccccagccatgtggaactgtaagtccattaaacctctttttcttcccagtcttgggtatgtctttatcagcagcttgaaaacagactaatacaataaattgtaccactagagtggggcgctgaagagatacccaaagatgtgaaagcaactttggaactaggttaacaggcagaggttggaatagtttggagggatcagaagaagacaggaaaatgtgggaaagtttggaacttcctagagacttgttgaatggctttgaaaaaaatgctggtaagtgatatgaacaataaggtccaggctgaggtggtctcagatggagatgaggaacatgttggcaactggagcaaaagtgactcttcttatgttttagcaaagagactggcagaattttgtccctgccccagagacctgtagaactttgaacttgaaagagatgatttagggcatctggcggaagaattttctaagcagcaaagcattcaagaggtgacttgggtgctgttaaaggcattcagttttataagggaagcagagcacagggaatgcttccagtttttgcccattcagtatgatattggctgtgggtttgtcatagatagctcttattattttgagatacgtcccatcaatacctaatttattgagagctttttagcatgaaggttgttgaattttatcaaaggccttttctgcatctattgagataatcatatggtttttgttgttggttctgtttatatgctggattatgtttactgatttgcatatgttgaaccagccttgcatcccagggatgaagcacacttgatcatggtggataagcttcttgatgtgctgctggattcggtttgctagtattttattaaggatttttgcatcaatgttcatcagggatattggtctaaaattctctttttttgttgtgtctctgccaggctttggtatcaggatgatgctggcctcataaaatgagttagggaggattccctctttttctattgattggaatagtttcagaaggaatggtaccagctcctccttgtacctctggtagaattcggctgtgaatctgtctggtcctggactttttttggttggtaagctattaattattgcctcaatttcagagcctgttattggtctattcagagattcaacttcttcctggtttaatcttgggagggtgtatgtgttgaggaatttatccatttcttctagattttctagtttatttacgtagaggtgtttatagtattctctgatggtagtttgtatttctttgggatcggtggtgatatcccctttatcattttttattgcatctatttgattcttctctcttttcttctttattagtcttgctagcggtctatcagttttgttgatcttttcaaaaaaccagctcctggataaaagttcgaaaaatttgcagcctgacaatgcgatagaaaagaaaatcccattttctgaggagaaattcaagcctgctgcagaaatgtgcataagtaaggaggagccaaattttaatcctcaagacaatggggaaaatgtctccagggcatatcagaggtcttcacagcagcccctcccatcacaggcctggaggcataggaagaaaaaatggttttgggggctgcgcccagggtccccgtgctgtgtgcagcctaggcacttggtgtcctgcatcccagctgctctagccatgactaaaaagggccaagacacagcttggcccatggcttcagagagtacaagtcccaagccttggcagcttccacgtagtgttgagcctgcgggtgcacagaagtcaagaattgaggtttgggaacctccacctagatttcagaggatgtacggaaacacctgaatgtccaggcagaagtctgctgcaggggtagggctctcatggagaacctctgctagggcagtgcagatgggaaatgtggggtcagagcccccaaacagagtccctactggggcactgcctagtggagctgtgagaagagggccaccatcctccagaccctagaatggtagatccacctacagcttgcactgggcacctggcaaagctgcagacactcaatgccagcccatgaaagcagcctggagggaggatgtaccctggcaaagccacaggggcagagctgcccaagaccatgggaacccacctcttacatcagcatgacctggatgtgagacatggagccaaagaagatcattttggaactttaagatttgattgcccagctggattttggacttgcatgggccctgtagcccctttgttttggccatttctcccatttggaacagctatatttacccaatacctgtacccccattgtgtctaggaagtaactagcttgcttttgattttacaggctcataggcagaagggacttgccttgtctcatatgagactttggactgtggacttctgagttaatcctgatatgagtgaagactttaggggactgtttggatggcatgattggttttaaaatgtgaaaacatgagatttgggaggggccaggggaggaatgatgtggtttggctctgtgtccccatccaaatttcatcctgtggctcccataattcccacgtgctgtgggagggactcagtgggagatagctgaatcatgggggtgggtctttcctgtgctgttctcatgatggtgtataagtctcatgagatctgatggttttgaaaatggtagtttccttgcacaagctctctttctttggtgccatccatgtaagacttgacttgctcctccttgccttctgccatgactgtgaggccccccagccatgtggaacagtaagtccgttaaacctctttttcttcccagtcttgggtatgtctttatcagcagtgtgaaattggactaatacaggtactgaaatcctctgactttatttctaggtgtttgtttgtttgtttgtttttgagacagagtctcactctgtagcacaggctggagtgtagtagcatgatctcggctcactgcaacctctgcctcccggatcccggttaagcaattctcctgcctcagcctcctgagtagctgggattacaggcgcgtgctggagatggcatggtggggttccaccatgttggaaccccatgagactttggactgtggacttctgagttaatcctgatatgagtgaagactttaggggactgtttggatggcatgattggttttaaaatgtgaaaacatgagatttgggaggggccaggggaggaatgatgtggtttggctctgtgtccccatccaaatttcatcctgatggggttccaccatgttggccaggctggtctcgaactcctgacctagttatccgcccacctcagcctcccaaagtgctgggattaccggcatgagccaccacacccggccatatttctagtttttaaaatacctaaaactatacatattgataggtataagccacataagcaaaagttctttagggtcctcattttcatgagtgtaaatgggttttgagaccaaaaagcttgagaatctctggtctacagtaaatctgtaacagtctgggttatttgagcagattggatggaaatctgtctttttcactattatgatctcaaggcctagcacaaagcttaatacacagaagtctctcgataaatgattattcagctattgtttcagcaaatatttgagtacctactatcttattaggttggtcaaaagtaatagtggttttcgcaattacttttaatataagacccaatgctaggtcaacttcatggttcattgtaaatcaaattgaaatggcccctgccataacttatttatttaatatgtcttcagagtttcagtccagctgggaagagacattcaataaacctttaaagattatggtaaatgctttaaacaaacaaacaaacaaaaaacccaggatgccgaaatgaggatggttatgtttgtatggtagatacagaatagtcagggatctctgaggaagagaaactaagactaaattttgaaaaagccagcctggggaagaagaagggaagaacatttcaaaaagacaaaacaggcagggcgtggtgactcacgcctgtaatcccagcactttgggaggctgaggcggaggatcactcgaggtcaggagcttgagaccagcctggccaacatggtgaaaccccgtctctactaaatatacataaattagccaggcatggtagtgcatacctgtaatcccagctactactcgggaggctgaggtgggggaatcgcttgaacccaggaggcagaggttgcagtgagccgagatcgcaccacttaactccagcctgagcaacagagcgagactccatctcaaaacataaaaaaataaaaagaacaaaacagcaatatacaaagataataaaggaaaaaaaacagaaaagacatcagagtggctagaggataatgaggggtgtaaaatgaggttgtacaggtattcaaaagccagctcttttggaactgtagattaagaggaagatcttgaacttaatcctaaatgtaatggaggccattaaagatttttaaataaggcctgacacagtgcattttaagatgattcatgttgctctgtggagaactaggggactagagatacttaacagaggaagcaggaagaccagttaaggggcagcaaaggatggcagggctccaaactagtatggtggcagtagagatacgcagaagtgaacaaatacaagatgtactttggaaacaatatagagaaatcttgctgatgatttgtgtatgtgtggcaaagaaaaaagaatcagaaatgagttccacatttctggtttggacaactgggtgcacaggagtgttatttggtgagtaactgagacacaggtttcagggtaagagcataacatcaaaagctatgtgggacatgtaatatttaaaatgcttacactaaagcaagtggagacactgagcagggattctggagaggtctctgccagggctctgaagtcctccacacatagctgatttgttgcatggtcagattaaaataaacactactttacaagataaataaataaaccagttcttaagtatttcgaattcatgtgtatatattcggtgctgctggataaatatcttcagatacaaatttgtacaccgttcctcagtagtgcaaatctaacaaattttccttaaggaaaacttttattttttaactttctcaagtaggagtttcaggacagtataaagccaaacattcatattaaagtaaccaaccctttcacaaaaagtaccactaagtccaaatattaaaagaacagttcccaaaagcaattaattacatacaggattaaagacaggcaaaagaccacctccatcatgaatcagatattataaaaggaaaatatgtcaagtctggcagacagtgttaaggttcagaactaaagttcagcttatatgtccctgtccaaaagggcactggacaccatttctcatgagaagctaaaacattcagaagtcaagctataacatggtaaccaaagtagtacatgtagaaaatgcagggttactcatccactttttgctcaagttggcttaccagccagaaagctctaaccctgaactggcaaaatggtagatgttcatttatccaaccatctaataaacaggtaatgcgtatcaactacattcagacactagagacacagtgataaacaatggagacacagtctctgccttcatggggcttatagctcactgatgaagccaaacaatcaaataagcatataaataacataagtaacaagcaataaatgtgatgaaagaaatattgtgctataacacatatatcagagagcctgacccagactaggtaataaagaaagacattccatgcctagttaacggtgtgcacaaggcttatgaggctggaggagtacagaaacctgtgtagctagaatacagaatggcataagataaaggctacagaagcacagaagagtcagaccctgcaagacctgtaggccatttaacgactggagatcccatacaacccgcaactgtagcacactacaagaatttctcccaggtgagatcggcactcacatctcaagcaggtcccctgaaaaacagcatgatttccacacatactcacatgtcaatgcctaagaacatgaccagaatgataaggagagctactctggcttccacaatgcagatcatcgtgcaggtagagaaaatcatttttatctggttcattttaaaggcccatcatgagataaacctaagaagaatggagaaaaaggcaataattgatataaaagtaaaacatgaatcagaaagcagaaaaacatctggagctaagagatacagatttaacaaagtctaacaataagtaaaatgttcacaaagaggagactggatgaataaattatggcacatacatttaatagaaaaatctacaatgataaaaaagcatgcaaaaactcttatggaacaatcgccaagatacattgttaaatgaaaagccaaggtgttgaacagtaaacacagtatacttcatttattaaataaaaagagaaacacactgtatacatatttgcttctatatgcatggaataacactggaaggatattcacaaaactattgacattggttatctttttttttttctttttctgactcaaacacatcttctgagacactggttatctatagagagggaaagatgggaggaggaattttctcctttttgaatttcaaaccacacaaatatattacctattaaaagtttaaaaaagttaatattcaatatgattttagatgagtacatatgaaaattttaatgaaaaggaacattttcaaggaaaataaaaattagcaaactgactgccaaatgggggggaaaaaaggtaagaaaagccttcttacaaagaatcctgtatgttaaaactttctggtacattttaataatctagcccccacaggctccatgagataaaactaatatttattgaatatttcccgtgtgctatatactgcatcaagcattacatgtatttgcagctcatcctcacaattcctgagataggtgttctcatcacctctattttacatataaggaaactgaagcatatccagtaagtaactccagaggtcagactctgcaaccactatcctacattaattctgtattaataaactggaaaaccttaaagaaatgcataattttctagggaaacaaaattacttgaaatctgtttgactgtaagtgttcttccaatgcctaaggaacaaattattcttagtctgcacagatagttcccaggacattaagaagaaaaagacgagggcttgccaattcattgaactaaattagaagagtggctttcaagaacatatttcctacaatgaaaatgtgttacaagaatagctatcttgtatgggatacttaccctgtgccaggcactggagtaagtgctttataaaagatctgggtgccacttggaaaacaatctggcagttcttcaaaacgttaaacatagagttaccacatgacccagtaattctactggtaggtaaaattaaaacacatgttcacacaaaaacttgcacatcaatgttcttaacagcattattcataacatagccaaaaaggggaaaaaacccaaatggccattagctgatgaacagataaataatgtatagccaaacaacagaatattatttggcaatagaaaagaacaacgttctaatacatgctacagcatagatgaactttgaaaacagtaggctaagtaaaaaaaggcagtcacaaaagctcacaccttgtatgattccatttatatgaaatgtccagaataggcaaatctatagacagaaaataggtgaatggttccctacggttggaggaagaggggaatgaggagtgaagagtttttttttagggtaattaaaatgttctcagattgagggcagtgatggccatacaactctgaatattactaaacaccactgaactgtacacactgtaaataggtgaattgtatggcagacgaattatatcttggtaaggctgttattaaaaatacatatctaggtgtattttcctaacaaccttaatgaaactgaaactaatatacttattttgtagacgagaaatctgcagctcagaggggacactatctactcatggtcataatctaaatagttgagaaagccagaattcaaatacgagtttttctgtctatactgcttactatctcccaacacaatcctatgcaaatgcactgaaaatcttcaagaaacggcccccctttttcttagaaaacaaacttatgggttgggcgtggtggctcacgcttgtaatcccagcactttggcaggccgaggtgggcggatcacctgaggtcaggagttcgagaccagcctgaccaacatggagaaaccccatctctactaaaaatacaaaaaaaaaaaaaattagccaggcgtgatggtgcatgcctgtaatcccagctactagggaggctgaggcgagagaattgcttgaacctgggaggtggaggttgcggtgagccgagattgcgccattgcactccagcctgggcaacaagagcaaaagtccgtctaaaaaaaaaaaaaaaaaaaaaaaaaaagaaaacaaacttatgactaacaggttcatgaaggcagcctcctaagaacaaataattcatatacagttgaaaatcccaaatccaaaaaaatcagaaatccaaaacacttctggtgtcaagcatttcagataaggaatactcaacctacaatgctattaagcatttcaaacctacaataagagggaagctgtccatttaagaagctagcagatggcttccaagtgcatcttaattcaagagtgccctggagaataataaaaataatagctataatttattaaacttttacaatgggtaaggcctggcaccaagcaccttatgtgaatgattatgtttaattatcataacaacttaataaggtagatgccattattacccaggttttacagatgagaggcaagccttaagaggtattttttcccaggttacaagctaaagggtggcagagctagaaatcaaactcaaatctgttagattcctgagcctcagccctcaaccaccactcagtacatttctaggctattaaatttgaaagccataatgaaatggaacgttcttgaaaggaagggagataataaacacttggcagacgtcaggggagtactttcctcaaaaagttctccaagcctttgccatttataggcaactttcttcacatttccaaagaacaaataattcttatgctttataaattgtgtaaatttcagcaaaaagagacaaaagtgtttcatttgaagaaagcacatggattttcaaccccaaatataccttattttgacataataagaatgtgtatgtaccaggaatgtgtctgagcactttataattgttagcttctcaaatcttcatgacaactatctaaggtaggtactattaataatccctattttacagatgaggaaggggaagcacagagagggtagatgactggcacaaagtcacatggctagaaagtggctaggattaaaaaccaagtcatctagctctaccctccagcacttagtctactcaaccaactctcaaaaaagaatatgctatagctaatatatgattcactggactcctagcactgtggattatcacactgactcccttcacatgtattatcccaactgacaaccaagaaggtaggtaagtttactgcctattgcaagatgaagaccatgaggctgagtgatgtgctaatttgcccaaatacacccaattaacacatatcagaaccaaaattttattaaacccacgtctttctgactctacatcacaccactagtcactgtgtcatgaaatactatggtaggggtcagcaaattacagcaagcaggccaagtccagtctgctgtgtttttatacagttcacacagccaaaatacaaaaattcggttgaatcaaaaatagatgggccaggcacagtggctcatgcctgtaatcccagcatgttgggaggccgaggtgggtggatcacgaggtcaggagatcgagaccatcctgactaacaaggtgaaactccgtctccactaaaaatacaaaaaattagccaggcgtggtggcacacacctgtagtcccagctactcaggagggtgaggcaggagaatcgcatgaacctgggaggcggaggttgcagtgagccgagatcgcaccactgcactccagcctgggcgacagagcaagactccgtctcaaaaaaaaacaaaaaaaacttgatggttgaaaaaaacaaaatatttcatgagaaaattaaatgaaacctaaatttcaatgttcataaataacattggctgtgttttactggacccagacacacccatttatttacagctgctttcacactacaaggacagaactgagtaattttgacaagacatcggtatatcgaacaaagcctgaaatattctctgtttggccatttacagaaaagatttgctgaccctctttgttattatatttaaaactcttattaaaagggaggagtagtgcacaaaaagtaccccccaacccccgaaaaaaggaagaaaaagcatggcctcaaaaggtgactggagtaggaatggaaactaacctccaactttcaaggaacaaataatgtctctgttccataaagtgttccaaggcctagaaaacagtggagggcttcccagttcattttaattaactggttcacagaggtttacaatccctaagctgttttaattggaaagaacgctgcagaatggaaataacaacagctggcagttatggaactttccctgtgctgccaggtgctgtggttaaatagaagatttccatttaatcttcctgacaaccaggaaggtagggtgccattgttatccaattccacggatgaacctgggtcctcgggatgttaaacaaattgccgtatgttccacatagagctcagcactctaaccctcatttctgccctccagagattagtcttaacaccccaccatttacttttattaataaatctgcaaacataaggaaatacataatttcctgaaaaaatataacgtaccaaaagtaactatcaaaataatcttggtgagctgtataaatttcctaccaactcccaggaagcaaataagtatgtgccacaaattgatctgggtcataagaaaacagacaagttttaataccctagctcactgggttgcaatagcactcatctctaactcatcaccactaaaaaaaaaaaaaaaaaagcacaattaaaaaaaaaaccatgcaagataatgatagctaacatttttagctgaactatgtgccagacactaaacactcctcatgcaataactcatttaaactaggaataaatatcccctgcagactaagacataaggaggttaaatggttgtccaaaatcacacaagcgagagggcctggatccaaatccaagccagcaagtgaacaaacccggcatccttaacagactttcagctaataagtctgagaatcctaattatacatgctcaatccagggaaaaaagaaattgacaaaactgagccaaacttaagggcataaaggggtgcgtggtacacctacagctttcaagcaatgtcaacagtctctacgattcactcagcaaagcagttctgaaccaaaactagcttcctctaaaagagaccaaactccacataaacgttacaatatggatgaacttcaaaagtgttctgctaaaggtaagaagaaaacatcataaactgtacaattcagttttcatggaacgtccagaaaagggaaatctcaagagccataaagtggattagtgcttgcctggggctgatcctcaaatgggctcgagggaactggggatggtgggattggttgacgtaaacattctaaaagtgggttgcggtgatggctgtacaactcatacatttaccaaaaaatattcagttgtacactgggtacattttgacgtaatctgcatctccacagaactgtgtaaaagaggctgagtaccccagcaactgcttcttgtcgaaagccatttcctatcctccgcgctaggcgtctcacaggcttttcccccagtcaaatcaatgctaataatcggaaatagcaagttctgagaaacgctagcgtagaatgggcgcactaggggtaaggggatgggccccagacttcagcagccgttctgggaagttgctcgcctttttcgaagactctagctgcaaaactggaagccgtcggtggggcaaggcagagaagagaccacgtctggcggatgagtcctgtgattatcaggtcacctgggtaacgcccaaccacgacgggctgggtctcagcgcgaggcctgcagcccggcgccgactggaatccccagcactgccgtctggaggacatcggcggtatctccccaagagacgggaagtctgtgtgtcgaagaggcgcgggacgcaagcccaccaacctggccgaccccagggaaaggccgagcgtccagcccgcgggggcccaagatggtgccagagttcgaggccctctgtgcatgcaccccgcccgccttcgaatctagcctgttcgccgttgtggtttgtcctcccggttcctctgaaggagttggtcagtagaaccatggcctccattgactacgtcctcagagtcgcagctctcttcagtcgagctccagtcacagaggacggttgtggtgagacccaggcagaagtatttccggtcaacgaggtcgcgggtagtgcgcatgcgcttcgtgcagggccctgcgcaagggcgcctgggaaaccttgcgagaagtgacacacgccctgtcctcagggagcccacggccgactgggaaacaggagaacgggtcaaacgtgggacgtccgtcagctataccgaaaggtctgtgatagagcttggagaaatgtgcatttggacacattatttttacattgtgatctagacagtgaggtaatcttttaaaaaataagttttagaattctattaaatttcagttttagaattatatttaatcatattttgaatattttgaaatattttgaaatttcatacggtttttttgtttttccggtttttttgagacagggtctcgctctatcatccaggctggagtgtagtgatgtgatcacagctcacttcacctcaacttcccaggctcaagtgatcctccctcctcagcctcctgagtagctgggactacaggcacgcaccattacacacagctaattttttttttttttttggtatttttgtagaaatggggtttcaccacgttgcccagactgatctcgaacttctgggctcaagagatccgcctgcctcggcctcccaagatttcgttatgttgtggggaaaagatgtatgattctatgatcagaatgaaagctctgagagggcagccactgatgagtgtaggtgcagtatcctctacaccttgcatggtacttggcatggaatggatgctccttgagtatttctcaaatgactgactggagtctttgaaaaaggcaccctgagttactgttaacagacagattcgctaataattagctactgttaatcggatagattagctaataacaccaacttttgatttgtctcagagtgacctagtgtgaaaagtagggttgcagatttagtaaataaaaaatgtaggataaccctgtcaaatgtgattttcagataaactaagcaaataatttgttagcataagtatgtcccgtttggatatgctgggtgtcctatattttatctagcaacttagaagacatgttaaggtgggggggaaaaatgattgtgttcctcttagaaaaagaactggaggagaaaagaaaacggtatccggaatttgtaaataagtacttccaaacaattctaaagcaggtcagaaaactacacttgagaaactgtgatttataaagttcgtggtaagtgttgtatttatatcatcttaattgaaacctcttacacagtagaacgattatttttattttataagtgcaaacagaagctcagagataggaggttacttgtccaagttctaatattttcactgtcaccccaaaaaatatgtattgaggcctctcggtggctcatgcctgtaatcctagcactttgggagactgaggcaggcagattgcctgagctcaggagttcgagaccagcctggccaacatggtgaaaccctgccactactaaaagtacaaaacattagccaggtgtggtggcgctaccctgtagtcccagctacttgggaagctgaggcaggaggatcgcttgaacccgggagggggtggttacagggagcagagatcacaccacttcactccagcctgggagacagagtgagactccatgtcaaaaataaataaataaataaataaaataataattattatttattgagagctgactgtgtgctgctggtctcggatttctattccacataatctgcctccagagctggaaaattccagtgtctgaccattcctcagcctccctccccttccccactccagctgcagtttccatggtaacaaactgaacctgcttctgtagctaacaagagctaagagtttttgagagggaataagccagaacaactgacgtcagcataccctggctgggggatgggaaggactgcttgaagccctaaagccttctattcctccatcaatggtttatgcaagaattttgtatgtgtcaacatctgtccttggatggagtctctgcaaaagaacaaaaattgtctatgtaaacctctgcagaccccatgaattcataagttttcacttcaggaattgcttcaaacactggtgacataaactttatgcatccttaccatattaaaatgtatttagtcattattcaaccaataatgatggggggcacttctacatatcaaacagtgctagatcccaaggatataattactatcaaaacatacacagtctctattttcctgtttcttagagttcagtggaagagacatttgtttattcttcagtgtattctaaggacccttatgtgtgagacatgtattagggactgggagatacacagatgagttcaaaacaaatcgttgagctgcatggaaatgatcctggtgggattggggtcagacattaaatagataatcacaaaacagcagatatttactgagcagctactgtggtgccaggcactgttttaggcaaggggaggacagcagggaacaaaatagacttggtgtctgttctcatggaacttacattctgatggagagggaaaatatataaatgaattcatttgcttttagttagaagaaaaaggatattaaactcaaattgacttaaataaaaaggagaatttattggcctaagtaactgaaaatgccagagatagaactgatctcatcagtattcatgaacataatttatgttgttgcagatctctgtagtttttctgcccaacactccttccccaggcttcctgccacagaagccttctttcctatggagaactggttagcatctgacctaggcctggtcacttcatgctgttgctatgcccacagtgattggttcaggaatgggcacatgactccaatgggccagtcagagacttactgacctgggacttttccttgggaattatgagaaatatcgttccctttgctgtgatgctaaactggtctgaagtgtgcctggcctatagccatcttttttgcctatctgaataagtcaagaaagagcatcccactgtgtgtttttaagcttctactagataatgcatgtaatgtgcttaacacagagtaaattctcaataaatgttagccagtgttgttagtgatttacaaaggaatgagtgagaagaaattatttgcaggaactgaaagattgtgcttcaaaatgaaggtaaatcaggagggtttttggagtgcatggaatgaaaacatggaggtccacagtatagagcaatgtttcctctgagccacgatgaggttttatgagctgtccagggttcactgaagaatatacttgcctggattcaaaatgcttggaccaacccattcagacattcactgaccccttccctgggtaagattctgtaaaagagaagatgcacaaggcatgatcatagccattgaggaccttatactcaactggagtagcagggaggtgaacaaccagtaacagtaaggccagaggagtacggggcaagcttcagctccacattcatttacataagaaatacacaggaacatatctaacatgccagccatggtgcgaggtgtaagagatattgtattgaaccaaactgatgccttttttattggaacttataatcaagtgcagtggttagcaaaacttcaggaacagaccagacaataactattttaggcttgtgggctgtacagtctctgttgtaactatgcaactctaccattttgtgtaaaatctgccatggacaatatgtacgtgaatgaacatggctatgttccacattattttgggacactgaaatttgaatttcagatgattttgtcacatcaaaaatactcttctttggatttgttttcaaccatttaaaaatactgaaaccattcttagctcatgagccatacaaaaacaggcagtggggccagttgtagttgctcatgcctataatcccagcactttaggaggccaaagcaggaggatcgcttgagcccaggagttccagactagcctgggcaacatagagagaccctatctctactaaaaatagaaaaattagctaggcatggtggcacatgtctgtaatcctagcactttgggaggccaaggaggtaggatcgctttagcccaggagttcaagatcagcttgtgcaatgtatcaaaacttcacctctacataaatattaaggcttaaacagcagaaatgtgttgtctcacagttctgaaggccagaaacccagcagggctggttccttctgacaacagggaagaaggatctgttccaggcctctcccctagctgctgggggtttgctggcagtcattggccatcattggcctccattggccattgccctgatctctgtcctcatcttcacattgtcttctcctgtgtacacatctgtgtccaaattcctccttttcataaggaccccagtcgtactggattagggcctgtcatactccagtgtgacctcgtcttaatgtcttacatctgcaacaaccctatttctacataaggccacatccttaggtagtctgggggctcagactttaacatatgaatttctggggtggggttggggatcccacagcagcaagtgtgccagcctctttgctggtctccctgcttccactttttcccacttcctttcatttccccagcctaggcaagggtgacctttctaaaatgcagacaggaccaggagcctgctgtgagtcatggggctcactgaggccttgttttttggttttttgctttttgggatttttgtttgtttgtttgtttttgagacacagtttcgctcttattgcccaggctggagtgcagtgacgaggtctcagctcaggaatcaagggaggattcctaggtgtcgtgggccagcgtcccctctgcacgttcagcccatgtggatgttttgaagcttcctctcctcggggggcacaagcttcagccagaaaattcatcccatttgtctcaacatttctgtaactctccaaagaaatttgatcatctcccactatcagcactgtcagttggggtctgtccccaggactccatccatgttgccaccatctctccctgggcatctgctgtggcctcctaaacgttcttccttttctatctagtcaccttccacccgttccacacacacacagtggccaaaaagaaagcctcactgtgtaatctcctgcccctgctccgggtaccccagggctgccgcccatcagggtaaagtccaagtggccaacatgatgcctcgggccctccaaacccaaccttgccagctggcccagcttcacctctctctgctcccatcctgggtctccatgctgcggcagtaatgacaatcttccagttccctgcggaggccacgtgccctctgaggagctggctgtactcactgtccccatagactcatttctcccctcccattttctcctcagttcactccaaccaggatttgctgccactctacaaaatcttctcaagatcaacaataccctctgcctgaccaacatggtgaaaccccgtctctactaaatacaaaaaattagctgggcctggtggctcttgcctgtaattccagctacttgggaggctgaggcaggagaatcgcttgaacctgggaggcagaggttgcagtgagccgagattgcgcccctgcactccaacctggacaacacagcgagattccgtctcaaaaaaaaaaaaaaaagaaaaaagaaaaaacacacacacaagaaaacaaaaaacaaacaaaaactacatcagacactttctaaggattaggaatgtattggttaaaaatcaggtgaggcagttgtctctggagatgatgtcttaaaattaaaacatgaatggaaacccaatatggtctacccatacaatggaatattgttcagccttaaaaaggaaggaaactcgggcacttcttacaacatcgatgaacattatgacattatgttagatggaagaagccagtcacaaaaggacaaatactgtatgattccacatgaggtacttagagtagtcaaattcatagagatagaaagtagaatggtaagtgccaggggctgagccacaggaaatggggagctgttgtttaatgggtacaaagtttcagtttttcaagtagaaaagagttctggggctggatggtggtgatggttgcacaaagatgtgaatgtatttaatgtcactgaacttgaggattaagctctgattcttttatcttgcccaaattcctatgtaaggggtctgggaagtcatgccctacaaaccataaattctcatcagataggttttgtttaaccctatatattgtaacttactttctcatctgactccggcataacgttacgtgatgaagaagaaagtcaaaatattttaccccaaacatgtttctttgccatgttttgaaatggccattgaaagctgtcctttgtgggggaaaattcgcatctgtaaagaatctctataaacatagctagatctttttcttctaggccttcccaatcctgaggagattaactaagagtctagcaccttttaaaggtctgaatatgaaacatttgtcatctattgtgtctaagagcagccactataagacttcaaaagaaccctggggccaggcgcggtgtctcacacctgtaatcccaacactttgggaggctgaggcaggcagatcacctgaggtcgggagttcgagaccagcctgaccaacatggaaaaaccccatctctactaaaaatacaaaaattagctgagcgtggtggcgtgtgcctataatcccagctacttgaggggctgaggcaggagaatcgcttgaatccgggaggcagaggttgcagtgagccaagatcatgccattgcattccagcctgggcaacaagagccaaactccatctcaaaacaaacaaacaaacaaaaaaaaccttgtccacaatcttttatcttaacctgaacattttctttctgtagattccaactatttagacaaactcaaccaattgtcaaccggaaaatatttaaatttacctatagcctggaagcaccgcccccatctcatgcctccctaaaatgtataaaaccaagctgtaccccgaccgcctggggcacatgttctcaggatctcctgagggctgtgtcacgggccatagtcactcatatttggctcagaataaatctcttcaaatattttacagcattggactctttttgttgacaaactgtacacttaaaaatggttaagacagggccaggcgtggtggctcatgcctggaatcccaccactttgagaggctgcagcaataggatcactggagcccaggagttcaagaccagcctgggcagcatagtgaggccccatctctacagaaaattgaaacctgagacaggcatgatggtgtgtgcctctctagtcccagctacactcagaggcagcgagaagattgcttgagcacaggagtttgaggctacagtgagctgtgatcacaccactgaactccagcctgagtaacgagcgagatcctgtctccaacactttttaaaagcaagggttaagatggtaaattttatgttatatatctttttttttttttttttttttttttttttgagacagagtcttgctctgtcacccaggctggagtgtggtggagtgcagtggcacaatctcagctcactgcaacctccacctcccgggttcaagcaattctcctgtctcagcctcccaagtagctggaattacaggcacgtgccaccatgcccagctaatttttgtatttttaggagagatggggtttcaccatgttggccaggctggtcttgaactcctgagctcaggtgatctgcccacctcagcctcccaaaatgctgggattataggcatgagccactgtacccagcctgtgttatatatcttttgccacaattaaaaataatttttaaaaattaacacataaataggccgggcaccatggctcatgcctgtaatcccagcactttgggaggtcgaggcaggtggatcacctgaagtcaggagttcgagaccagcccgtccaacatggtgaaaccccatctctactaaaaacacaaaaaattagacaggtgtggtggtgggtgcctgtagtctcagctacttgggaggctgagacaggaaaattgcttgaacctgggaggcggaggttgcagtgagctgagatcacgccattgcactcaggcttgggcaacaagagcaaaaccctgtctcaaaacaaaaaccaaaaaaacagaaaaaaaaacacgtaaataaatgacacctaccttgtaagctcatcctccatgctgggaacacgtttttgcctcttggcttggcttcccaaagagtatattaccccagagtttcagagatacacacattctagtcctcacctaagctaattccattccagtccaactcttccacttttaaatggcccccttgtaggaacatccacatcactcatctgggaatatcatcatttggcaatttaatgatctctaggcaaagacacagtagagattttacccactggtgtggcttggaatgctgcctgtggtggctcagtgctgtgctcaacttggcagaaccagagtgatgtttcacagagtccactttctgttatggttctcggctgggcttggccaccagaggtgtttgcctgggatggagaacgcatgggtggagcggcagctgtgtgtgccctgtgtgtgtgcgtgtgtgtgtgtgtgtgtgtgtgtgtagaggttacagttgggccaggtgctatgcagctcatgcacgtccctgccagctgctggctcaccttgtgtatgtgtgtgtgtctgtgtctgtgtgtgtttagaggttacagttggaccaggtgctatgtgtgtgtgtatgtgtgtgtttagaggttacagttggaccaggtgctgtgtgtgtgtgtgtgtgtgtgtgtgtgtgtttagaggttacagttgggccaggtgctgtgtgtgtgtgtgtttagaggttacagttggaccaggtgctgtgtgtgtgtgtgtgtgtgtgtgtgtgtgtgtgtgtgtgtatttagaggttacagttgggccaggtgccgtgtgtgtgtgtatgtgtgtgtatttagaggttacagttgggccaggtgctatgcagctcatgcacgtccctgccagctgccgcctcaccttgtggctcatgggggcattcccagctcccactgaaaccacctttgcaaaaattatatcagtgagaaaatgttggcatggaggagagctgatctagccaatcttcctcttgcctttagctttcaagttaccttaattatcactgggcttaggctgagctaactttgagagatatttaggttatagtttaagtaataacatcccttccccaaaactcaaccgcctttggaaagccaatgagagaccaccagagtaagggaggggggaagactgaattctgctaaggtgtagacttaaagattgccagccattattctggaggtcctgcaggtaacattgctattgtggactggccttttgagatatgttttcaggttttttgcatgtctgacacccatgactccacctggacccatccacgatggctcctgtggccctacccagaaccaactcaacataagaggatggtttcaactccctataatttcacctctgacctaaccaatcagcagcaaccattgcataaccacccccgccccttatcccaaactacttttgaaaaacccccaacctacaagcctttgatgagattgatttgagtaataactccatcttttgtatggcgtggctggcctcacgtcaattaaattgtttctttactgccataacatggtctttatttgtgcagcagacaggaagaaacttttgggtggttacaccactagcttctcctgggctgtttgcatgtttttagctcacactgaagggctccagggtctcctgcaaaatgccccatccccacaggccatgagagactgatggaggttccaattcatctccgtgggtgctggcaagacctcccagatccatttgcacttgttcttcttcactttcctttctcaacggcagcaccagcaccaaacataggttccagggctaagctcgactgtcgagccacctccacggttgcagaaggtcaagtccctattttaaaacaaaagcagaagaaatcctcatgccacatcactcctagtgattccaacacctcggattggaccctgtgccagatccaccatctttttctcaatgtgtcctgtacgtccagtccaggtctctggtcacgcatgaatcctgctttcactggacgtttccacttcggtctggttccagttggtctcagtcccttgactccaaattctgaattgtttctttttcagtgttaatcagatgtgctcgggatgccagcacccacccactcaccaggtcagaagtctgggacgtcttgggtccttctgcccccctcaaatccatcacttgcatctccaacagaaaccttggtttgtccacacctgtctctcactgcctccatccccatgccaccctccttagctgccgagcttctgttatctcttccctgttcaagaatgaccatttccttgttgtatctgcttcctcactgcccctttcccatacgttcatcacatacagccaaggtcacctttccaaaaaacatactggccatgagtacattgggctgcctgggaagagccagaccccagcaggaagctgcagaaactgtcaaggcaggcaagacacagacctcctctgtccccactctgagtaggagtaaggagggaggccacagaaggtgagtcagggtgttgccaggggaggctgcatctgcttgtccccctctctctcctctgtctgcctctctaaagacctcacccttctcagggagtaggtgcggcaaggggagaaggcccctgagatgctcgtgaccctgacctgctgggtcagccttttttccctctctggaattgccttttttcttctcagagggtggaggcccttggctttgcctgaaattctttgcttagtcactgaacacataaacctgttccctgtcagtcaccccaggcagagacaaagctatagttcttaagtgctcctgtctgccccaagttcagccagtcagcttcctatcgctgccaattttacctcatttttcttttttctttattttattattattattgttttttgcgatggagtctcactctgtcacccaggctggagtgcaatggcccagtctcagctcactgcaacctccgcctccccggttcaaatgattctctggcctcagcctcccgagtagctgggactacaggcgcccaccaccatgcccagctaatttttgtatttttagtagagatggggtttcactatgttggccagggtggtctcaaactcctgactttgtgatctgcccgcctcggcatcccacagtgctgagattacaggcatgagccactgcgccccggctgtttttcttttttgtgatgagaagctttatttataataaccgcaaactgacaacaacccaaatgttcatcagttgattaaagaagttgttttgtatttttacaatcaatattcctcaacaataaagagtaaactattggcagatgcatcattatgcttaaatccccaaaagctgggtgtggtggctcacatctatcatcccagcactttgggaggctgaagtgggaggatcacttgagcccaggggtttgagaccagcctgggcaacacagggagaccccatctctacaaaaatatttaaaaattagctgggtgtggtggagcatgcctgtagtcccagccacttgggaggctgaggtgagaggatggtgtgagcccaggagattaaggctgcagtgagccatgattgctccactgcactccagcctgggcgacagagcaagactccatgtcaaaagaaaaaaaaaaacaaaacattaaaatgaggtcattatggtgggtgctgatccaataggactgctattcttattagaagaagaggttagggcatgaaaagatcacattctttcaccactttcttctaaacaggcttcctccctcccacccatgacacagctgtgctcaaaatctactatgttgtcagatccaacagtcactcctctgtcctcaggttatgtggcttcactgtggcaatcaagagagttgacctcttcctccttctcaaaaacgctttcttcttgtgccttcatagaccctctatcctgattgtcctggccccaccttcttccagctctccttcttctgcttgtaggtactaaagctgaaagcgtgcacaccctctgaccccgccattcttattcagggagcccagatgaccactccacaaatgtgcactgagcgcggaataataataattgccaatatgcatcgagtgcccacattaggccagtcacgcgccctgtccaggaatgcatttagacgaacaatttatatctccttcacgtttcacagagctgacagtctcatggggccccaattgtcaaaaaagttgagaataagcaagttctcacaagcttgggaaaagatggattagtcagcagccagggaaacggagctatcagaatcagttttaaagtcgtacaactgacccgtggcagcctgcctcagtgaacgcgcctttgcacgccaaacaatcatttggttaggagggactcactctgatacacacgtctctgagtgccaaccaatccacaagggtcccactcgagaaatcacggtcctgcagatgatgtcagccccttgatgtctatgaaagccccacaacctctgaactccacattgccccgaaaccctccataaaaccagaccgttctgcacagagagactgtctggttagcagagctctctctcctttattatggtaagaaatcaattcaggattgttcttttatttcagatattgaattgtgttagcttgggctgccatgacaaagtaccacagaccgagtagcttaaacaacagaaatgtattttctgacagttctggaggcaaaaagtataaggtccgggtgttgctggggttggctccttctgaggcctctctttggctgatatctggctgcctttcccccatgtccttacagggttgtccctctgtgtgtgtgtctgtgtcctggcctcctcttcttaaaaggatagcagcatatggattaggactcaccctaatgaccacattttatttacctctttaaagatcctatctctggccaggcacagtggctcacacctgtaatcccagcactttgggaggctgaggcgggcggatcacaatgtcaggagttcgagaccagcctggccaatgtgtttgaaaccccgtctctactaaaaatacaaaaattagccaggcgtggtggcgggtgcctgtaatcccagctacccgggaggctgaggcaggagaaccgcttgaacccaggaggcggaggttgtggtgagccgagatcgtgccactgcactccagcctggtgacagagcgagactccatctcaaaaaaaaacaaaaacaaaaaaacaaaacccacagataccactgggtgacagttgtctacagtattcaaaacaatagcatcctatccaggtgtgtggtctgggagcaactggctgtcctatagaggctgggtgtgcagtagactctaccaactaggtgtgtgtaagtgcaatctaggatgttcacacaatgacgaaatggtctaacagcgcacttctaagcacgtttagggatgtacggctgtgtagagttcgtggcaggtgtcaagtaagtagaattcttcccaggaaatttttctttttcttctttttctgagacagggtctcactctgtcacccaggctggagtgcagtggcacaatcacagctcactgcagcctccacctcctgggcttaggtgatccttctgcctcagcctcccaagtaactgggaccatgggagtgcgccaccatgcctggctacattttttttttttttctgaggtggagtcttgttctgtctcgcccaggcaggagtgtaatggcaggatctcgggtcactgcaacctctgcctcctgtgttcaagtgattctcttgcctcaacctcccgagtagcttagattacaggtgcctgccaccacacctggctgatttttgtatttttagtagagatggggtttccccatgtggccaggctggtctcgaactcctgacttcaagtgatccgcctgcctcagcctcccaaagggctgggattacaggcatcagccaacacccagtggttatttttatgttatttaacatattctctatattatccaggctggtctcaaactcctgggctcaagcaatctacccacctcagccttccaaagcactgggattacaggcatgaaccaccatggctgtcccccaggaccttattctaaacacagttcagtatttcccaagcattcttgaatgccaggaactaggctgggacaatagtagtgtgcagaacagactagacatctattcagcaatcttgcttctgggtatacacacaaaagaatataaatccgggtctcgaagagatgtttgtacacccgtattcatagcaccattattcctagtagccaagcggtggaagcaacccaatgttcactgatggatgcgtggatgagcaaaatgtgctctatacgtacaatgaaatattgttcagtcctgaaaagaaaaggaaattctgacacttgctacaacatgaatgaaacttatttttttttttttgagatggagtctcgctgtgtcgcccaggctggagtgcagtggtgccatctcggctcactccaacctctgcttcccgggttcaagtgactctctcacctctgcctcccaagtagctgggacctcaggcatgcaccatcatgcccagctaatttttgtatttttagtagagatggggtttaccatgttggccgggctggtctcgaactcctgacctcaagtgatccgcctgccttggcctcccaaagtgctgggattataggtgtgagccaccgcacccggtcttgaatgaaacttttgaaaatattatgctaagtgaaataagccagtcacaaaaagacaaatactgtatgattttacttatatactgtacttagagtagtccaactcataaagacagaaagtaaagtggtgattgccagggactgagggaagtggtgagtggggagttaatgagggcagtttcagttttgcaagatgaaaagagctctggaggcagatggtgatgatggttgcacaacaaggtgaatatatttaacactgctatctgtacggtaaaaatggttaagattggctgggtgtggtggctcatgcctgtaatcccagcactttgggaggccgaggcgggtggatcacctgaggtcaggagtttgagaccagcctgaccaacatggtaaaaccccatctctacctcatctactaaaaatataaactactaaacctcatctactaaaaatacaaacaattagctgggcctggtggcaagtgcctgtaatctcaggagctactgagacaggaggatcgcttgaacccaggaggcggaggttacagtgagctgagatcaagccattgcactccagcctgggcaacaaaagcgaggctctgtctcaacaacaacaaaaaagtttaagatggtaaattttatgttacctgtattgttccacaattaaaaaacaaaacgggctgtgtctctgctgtcatgctcttgttttcctgcacttcttggaggctgcactctcagtagccagacttggagctctggacctcttggcttgaaacatttccccttgccattccttcctgttctgcctgcacttttcaggacacttcctccaaggaggccctctctgatgccttcctcccatccccttcagaatcggggtagccccagtggtggcttcaccagcctcatgagatccagttttgttcatctcttcgcaactccacattcggtgatatcacattgttagcttcaggtcagccacagtgggaatatttacaccatgggaattggcagactctacaaagcatggttttgttcccttgagagctagttgttaaacatttaccagcccaccatggaatggtcaccccttccgtgctgctcaaacatcctgtcctctctgatgtgatgtctgtcttccctgttagatgataagcttcactaaggcaggggccaggcctgtagctggtgagtggtggaaccagggtttgaaggctcaggggatacaggttgaatatcccttatccaaaatgcttgggaccagaggtgtttcaggtttcagattttttcagattttggaacatttgcatttatgtaatgagatatatcttggggatataacccaaatctatacatgaaatttatttgtttcctttttttttttttttttttttttgaaacggagtcatcttgctctgtctcccaggctggagtacggtggcacaatctcagctcactgcaacctccacctcccaggttcaagcgattctcatgcctcagcctcccgagtggctggaattacaggcacccaccaccatgcctggctaatttttttttgtatttttagtagagatgggtttcaccagactggtttcgaactcctgacctcaggtgatctgcccgcgtcagactcccaaagtgctgggattacaggcatgagtcacgatggccggccttatttatgtttcatagacattttatacacatagcctggagataattttatgcagtatttttaataattttgtgcatgaaaacaaagttttgactgtgttttcactgcaaccctttgcaattttcctcgtgtggcatcatgctggcactcaaacatatcagattttggagtatttctgatttcagattttcccattagatatgctcatcctgtaatggccaccctaatttcagtctctctccctggaaatcaacaagacaataataatgatagaaataatagtcagccaggtgtggtggctcacgcctgtaatttcagcactttgggaggccaaggtgggcagatcacaaggtcaggagttcaagaccagcttggccaacacggtgaaacccagtctctactaaaaatacaaaagttagctgggcgtggtggcacgtgcctgtagtcccagctactccggaggctgaggcgggagaatcacttgaacctgggaggcggatgttgcagtgagctgagatcgtgccactgcactccagcctgggcgacagagtgagaccctgtctcaaaaaaaaaaaaaaaaaaagaaaaagaaaagaaataatagtcatagctgttattatgaattgcagcattcctgtattcctgcagaccttttacctttacaaaaaccttaccctagctcagagtcgtctcctcccacctctccgctggcttcttcagccacactgggtttctttctccctctccaacatatttctctccattgtcttctcacttctcggtatgttcttccctcagatctttgcttgactgatcatttaggcttccttcaacttaaatgtcacttccttgaaggggccttttctgagaacctgagctaaaatagcctcggtcaccctccagtaatgtatgtcgtgctgtaagtggcctcatccccataattaacccccagtctttcatgtggacaacttgtgtctcctcaaagttatttataaagcaatatacaaaccggcttcaagttcctttctctttaccctctgaagtccctcctatgtagaaactcctgaggaaccagcaagttccccagttttatgatcttcattaattattttattgtggtaaaaaccacataacataaaatgtaccatcttaattactttaagtgtacaatttagtaatgttaagtattttcacattattatgaatcaggtctccagaactctttcatcttgcaaatcggaaactctataaccatgaaaaaacaactccccatttcttcctaccccattccctggtaaatcaccattttactttctgtttttatgaatttgactcagtaacttcgtataagtgagataatagcatttgtctttttgtgactgccttatttcacttagcataatgtcctcaaggttcagtcatgttatatcacaacacttccttttttatgctgaatactaatgttccattgtatgcatataccacattcccattgtccatttatctgttgatgggcatttactttgcttcaacctcctggctattgtgaatagtgctgttaggaacatggctgcacacatatctctttgagtccatgttttcttttgggtaaatacctagaattggaattgctggatcataaggtaattctacttttaattatttgaggaactgccataccattttccaaagtggctgtaccattttatattcccatcaatggtgcccaagggttccaatttctccacactgccttctttattatttttttattttttgagacagagtcttgctatatcgcccaggctggagtgcagttggcgtgatcttggctcactgcaacctcggcctcctgggttcaagtgattctcctgcctcagcctcccgagtagctgggattacaggtgcgcaccaccatgcctggctaattttttgtactgtcagtagagatggggtttcaccaagctggccaggctggtctcgaactcctgacctcgtgatctgcctgcttcggcctcccagagtgctgggattacaggcgtgagccaccacgcctggcccacattgccttttatactttcctttttttttttttttttgatagtagccatcccgataggtatgagttggtatctcattgcggtttcaaattgcttttctttaatgattaataatgaacattttttcacgtgcttgtttgtcatttgtatatcttctttggagacgtgtctattcaagctctttgcccatttttgaattgtgttatttgatttttttggtgttaagttgttgtagttctgtatatattttcaatattaaccacatatcagatgtatcatttgcaaatattttctcttattccgtaggttgtctttgcattctgtcaattgttgtgttatttaaggcacaaacattttacatctgatatagtcccatttgcctattttcacttctgttgcctgtgcttggtgtcagatcctaaagcatgtcattgcctaattccatttattttaaaaattttcttgtcaggcgcggtggctcacacctgccatcccagcactttgggagactggggtgggtggatcacctgaggtcaagagttcaagaccagcctggccaaaatggtgaaaccctgtctctactaaaaatttaaaaattagctgatcaaggtagtgggtgcctgtaataccagctattcaggaggctgaggcaggagaatcccttgaacccaggaggtggaggttctagtgagccgagatcccaccattgcacttcagcctgggcgacagagcaagactctgtttcaaaaaaaaaaaaaaattatcttgattctgtttgtcagttcccacaccccatttcatccactccaggagaaaacagacatgtcttcggctcccccggacttcctagaatttaacacagtgcccagggcacaagcatgaaacatacttgctgaatgagtggatgctctgttgccgatgtctgacagaatattatttatagcttacacctgactgtccctaggcaaggtctctgaattcttctggtcggcaccagaagggagggacgaagcttccagaggagacctgcctgccactgccctgtgatggggaacctaagggacaggcagaccttggcttttggtcccccagagagctggctctgtactggggctgggaatctccctgatctttgatttgcagggtgaatggggtggaaccttctgcccctccctccattccccctactctggtgtgcaggaagctgaggccttctaggagactggggatactgaggctgagggaggtagggaggagttaggaggtttttgattctcacttgaatctttcccactgtagctgaaaacagggtttttgggtcacctgccccagcaggggatgggagtataggcggggtctgcgtctgcaaccccctcctgaatgtggaaatcttaacggggccaacacctcccccgttgctggatatggaagcaatgatactttctcccttccagctctgcactccttataccccactgggatagaaatcctgtctgttggtgtcaggcaggggtctccggctacccctcctctgctggggtggaagatggagaggtcaaaggagcaagcctccttcctggcccttgcaagggcctccagcctggcagccggagggattaaggacaagaggcccctggcgtccgtgagtctggcgtggctgcccaggagcctcccaggggagtcagcgtgggccagagggctggaggctcccagatcaatcagaggtctgaaggtcactggagctgtgaccttcaaattaggatacttgtaacccaggaggctggcacacccccacgggggatggggcgcatggttgaagagaatccatctcccagagaggtgccctagggcccccctttcaccatgaccctgctaacactttacagatgaaaagcatacctctctctcaccccctaatcttatcgcagtgaattgccctggggtgaaagaaaagcctctggatcccaaacctagaatcactttgaaatactgctgtccccaacggctccctttatagaggccctgggctgcctttgaggtgcatattttgcaaggttgaaagcaggagggagtgaaaaaatgcctgcatttgcctctgaggtgctaaaggaaaaaaatagctcaatgatgatggatgggcagactttatttgggatcaccgcagtgggtacggggaccactgccataggggcttgcggttggttggtgagagaggttgggttaattcctgaatacagcagggagagtgggaattcacagccaaggagcagggtcgggagcagtggctagaaaactgctaagaggaaacttcagagataagggcgattctggttaaactgaccttgctagattcctgctgaaggcagccccgggtgacaggaggaatccaatcagacatcaaaggggatcagatgtcgacagtggagggttccttctaaactcacttagcagggttcttccctgaaactgggtcttagatgggcctagcacaagattcagaagcctgtctaaagtgtggccaagcctgggcgcagtggctcatgcctgtaatcccagcactatgggaagccaaggtgggcagattgcctgaggtcaggagttcgtgaccagcctggccaacatggtgaaaccccatctctactaaaaatacaaaaattagccaggcgtgatggcacatgcctgtaatcccagctactcaggagtctgaggcaggagaatggcttcaacctggaaggtggaggttgcagtgatctgagatcatgccattgcactctagtctgggcgacagagtgagactctgtctcaaaaacaaaacaaaagaaaacaaacaaaataacgtgtggccaagcaaagagtctttgtcagtggatcagtgtctatatgtcaagtcaaaggaatatattgcagataatatagtatcttctgttttcctgaatgatgatctggatgtgtaggagaaaggctttcaccagctttggctgaagggtggttttgtattgcaactctgtcttcgacattcaataaatactgaattcactgtcagtcagtcaatgacttcttggctagtctcttgctagtttattcctaccaagccttacttcactcaggcaaatggcaatggggactctgttgttgattctctagtaagggatggacatctacaataaatttattatagattgtctctttacttacttgtcataaataagattattatataattattgcattacatatttaattatatgttatggataagattattgtaatataatagtaataacctataatgaatgagaaatgtgccccttttgcaaaccctgcacttacttgtctgatacctttcttcttgaatttcatggaatactgtctcattccagtaataagaaaattcacggaagatacaggcatgacctaagtgttctcaccaaacattttcagagtattctcgcaataaccctttgactgggtactttcagagatcctttttattttccacataggaagagataatttgtctaacagctactgaataaacagatccaagatttgaaccctcatagtttggatgggaatctgagttctttcttttttgtttgtttgtttagacaagctcttgctgtattgcccaggatggagtgcagtggcacaaccaccactcagtgacaccttgacctcctgggctcaaacaatcctcccgtctcagcctcccaagtctcagcacacctgggactacaggtgtgcatcaccacgcccagctaattttaaattttttgttagagacgggtacttcctatgttgctcaggctggtcttgaactcctgggctgaagtgatcctcccacctcagcctcccaaagtgttgggattacaggcatgagccactgtgcttgaccaacccacatctcattcagctcctgcaccatttctcttctcccccttagaactaactctatagcctcatctttacttttgcatttctctatctctcttaacctcattccaatcaagctttcatctataccattttactaaaaggccaccaataatctccacattggcaaatccagtagttgagttccagctgtcataaggacttgacaatttgtcacctgtccttcttcttccttttttttttttttgagacagagtctcactctgtcacccaagctggagtacaatggcatggtcttggctcactgcaacctccacctcctgggttcaagtgattctcctgcctcagcctcccaagtagctgagattacaggcgcacactgccatgcccagctgatttttgtatttttactagagacggggttttgccatgttggccaggctggtctcaaatcccaacctcaggtgatctgcccacctcggcctcccagagtgctgggattacaggcattagccaccgtgcctggcccaacccgtccttcttagaagacttgagtccacactgaattgggttcaccagacctccctgacaattctctcttctggctttcttcctacctcccctgttgctggatatggaagcaatgatactttctcccctttccttctctatactccctataccccactgggatagaaatcctgtctcttggtgtcaggcaggggtctcaggctacccctcctctgctggggtggaagatggagaggtcaaaagagccagtctccttcctggcccttgcaagggcctccagcccgacagccagagggattaaggacaagaggctcctggcatccctgagtctgaccagattgtagtagccagcctccaaagtggcccgcaataatcctcactccctagtagtgctcacagtcttgtggtctcttctgacaccgacccagagctggttcatgaccagctgaggctgagggaagtgtgaagggagagtctaggaagtttttgattctcatttgaacccttcccattgcagctggaaacagcagaacatggaggaagtgatagtgtgtgtgacttctaatgctaagtcataatggacatcgtagtttccacttggatcacttgcttgggagtaggggtaggaattcagccaccatgttgtggaatactcaagtagcccctggagaggtccaggtgcagaggaatcagcttgccagcaccaacttggcaaacttcgagtgagccacgtagattctccagccccagtcaaaccttctgaccacctcatgagagaccccagaccagaactgcccatcagagctgtttccaaatccccaactttcagaaaccataaaagataataaatgattattgttttaagttaatacatttttgcatgatttgttatgcagcaaattgctaaccaatacatattctttctcatattcctttccatgtttttctactatcatgtctcaattctagagtgctccagagttcagtgctcagatcttgtctaccatctggatttgatacctaaatgatcccacacattgctaaactttgcaatagcatctatatattgttaaatctcagatttatagctctagctcaacatctcccatgaattccatcaacccactgtttataggaaatttccacttagatgtcttatagtactttccatcttaacatagctacgagtgaacacctcatctcacctcatccctgacacagctacgtaccctcagtctgcccatctcagtaaatgacaactccatcctcccagctgctcagacctaaggccatttttgattcacagctctgcatatccaatccatcagcaaatcctggttggccctcaatatgatagtggcttggacaataatactgattagattcaggaagaatgttccaggtgaatgctcagaggtagaaccaagcttatgttctccagaaacttcaaggaggctgtggtgggctaaatgttgccttcccctaaaaagatacatccatgtcctaatcctaatattcagagcctgtgaatattgctttgtttgaaaaaaaggtggggaggtgttgtgggagatatgattatgattaagttaaggttcttttgttttttttttttgagagacagggtctcactatgtcacccaggctgagtgcagtgggacaatcacagttcactgcagacttgaccttccaggctcaagcgatcctcctgcctcaacctcccaagcagctgggactacaggcatgcaccaccatgcctggctaattttttttttttttttgagacaaagtctcgctctgtcacccaggccggagtgcagtggctcaatctcggctcactgcaagctccgcctcccgggttcacgccattctcctgccccagcctcccgagtagctgggactacaggtgcccaccaccatgcccggctaattttttgtattttttagtagagacggggtttcaccatgttagccaggatggtctcgatctcctgacctcgtgatctgcccaccttggcctcccaaagtgctgggattacaggcgtgagccaccacgcccggccctggctaatttttgcttttttgtagagacaggtctcactgtgttgcccagactggtctcaaacctgaggatctcaaagcgatcctcatgcctcagcttcccaaaatgctgggattacaagtgtgatcaactgcacctgatcttttaccattttttaattgtggtaaaatagacattacataaaaatttccatcttgaccatttatttacagacacagttcaatggtattaaatacattcataatgttatgcaactgtcactgccacccatctccagaactcttttcatctgtcccccaactgaaactctgtccccacgaaacactaattccccatttcctcttgttcccagcccctggccaccaccattttactttctgtctctgtgaatttcactacttaaggtatttcatgtaattggaatcctacagcatttgtctttttgtaactggctcatttctcctacaatgatgtccttagagttcatgcatgttatagcacatgtcagaattatcttcctctttagggatggataatattccattgtatggatggaccacatttttcttacccatttatctagcagtggacacctaggctgctttcacatttaactattactgtgaaaaaatgccattgtgaatatgggtgtgcaaatatcactttgagaacctgctttcaattctttgaggtatatactcagaagtggaattgctggatcatattgtcattatattttcagattttttttttttgagaaaaagtctcactctgttgcccaggctggaccaaagtgtcatgatcatgactcactgtagcctcaactttccaggctcaaacaatccaaccacctcagcctccaagtaactcggactgcaggtgcatgcagctaatttttaaattttttctgtagagatagggtttctccatgtggcccaggctggtcttgaattcctgagctcaagtgacctgcctaccttggcttcccatagtgctgggattacagatgtgatccacaactcccagcctttttttttttttggccagtttaataggtgacgaatagtatcctattttcttagttcacattttgaaaaatgagcaaagttaattcacctttaaaaattttgtgaggccaggcatgggggctcacgcttgtaatcccagcactttgggaggctgaggcagggcggatcatcggaggtcgggagttcgagaccagcctggccaacatggtgaaacctcgtctctactaaaaatacaaaaaattagctgggtgtggtggcacatgcctgtaatcccagctactcgggaggttgagggaggagaagagcttgaacccgagaggcggaggttgcagtgagccgagatcatgccactgcactccagcctgggcaacacagtgagactctgtctgaaaaagagaaaaagaaaaaaagaaaatgtttgtttcctggcagaaacaagggcagaatctgtctggaggggtataacctaacctagggcatacaggattcccactgataaaaccctagtaaagataagcccacaatccaaaactgcaaacaatgaaaagtccatcctgaatgagggttagtagaacaatcaaacagcaggattagatccccaggaattgcagctaacagaacttctgccagtcatgcattcacttatttaacaaatatttattgagcatgtgctaggttccaggcagtattttagatactttgggtacacaagcgtacaaacagtttacaagtcctgctctcagagagcataattccaacactggatagagactttataaaagaaagttattggaagatcattatacatggtatgcttgtatcacatgtaccccataaacgtgtagaactattatgtatccataaaactttaaaataaaaacataaatatattcaaaatgatccaagacaactcaacaacagcaaaacaacttgatttaaaaatgggtagagaagttgaatagacatttcttcaaagaagttatacaaatggccaaaagcacatgagaagatgctcagcatcgctaatcatgaaggaaatgtaaatcacaacggcagtgagaagccaggcacggtggctcctgcctgtaatcttagcacattgggaggctgaggcaggggaatcacttgaggccaattgtctgagaccatcctgggcaataaagtcctgtctgtacaaaaaaaaaattttttttaattaaaaaattagccaggcatggtggtgttgcctgtagtcctagctacttgggaggtgaggtgggaggatatcctgaacctgggaagtggaggctgcagtgagccatgatcgtgccactgcactccaggctgggtgatggagcgagaccctgtctcaaaaatttatatatatatcacaatgagccattaggttgtggctatatagatttttaaaaggcagaaaactacacgtatatatgagaatgtagggaaattggaatcttgtgcactgttggtgggaatgtaaaatcatgcccctgctatggaaaacagtatgatttaaaaaaaaaaaaacgtaaaaatagaattaccttatgatttagcctttccactcttgggtttataccaaaaaataaaaataaaaacaaaagttgaaaatggactcaggaaacgggtatctgtacacccatagcggcattacacccaataaccaaaacacagacgcgatccaatgtccattgacaggtgcatggataaataaaaatggagtctgtctacataaccgaatattattcggccttaaaaagaaggagattcttatacgtgctactatatggtaaaccttgaagacactattctaagtggaataagccagttacaaaacgacaaatactgtaagattccactcatataggtatctgaagtagttaaattcatagaaacaggccaggcaccgcggctcacacctgtaatgccagcactttgggaggccgaggcggatggatcatctgacgtcaggagtttgagactagtctgactaacatggtaaaaccctatctctactaaaaaatacaaaaattagtcaggcgtggtggtgggcacctatattcccagctactcaggaggctgagacaggagaattgcttgaacccaggaggcagaggttgcagtgagccaagatcatgccactgcactccagcctaggcaacagagtgagactctgtctcaaaaaaaaaaaaaattcatagaaacagaaagtaaaataatggttgccaggggctatgggtaaaggagaatggggagttactgtttaatagttctagagtgtcagttttgcaagatgagaaaggtctggagactggtcacacaacaatggggatacacttaataactcgtttaagatggtacattttatattccatgaattttaccacagttaaattattgaagacataaaaaaaatccaaatatttgaaaacaacaagacataataaaatatcggggatattgaaaaaaaaacctttgttttctagaaataagaatttagtcagtgaaggtgttaaccaggagattagagccatctaatgagataattagtgaactggaaaatagatttaaggaaaccatgtagaaggtggccagggaaaataaagaaattttaaatatgaaagaagttaagagctgtagaagatagaatgagaattctaacatatgtgtatgtaatgcatttcaatttttttggctgcaattgagagaaaccggttaaaatgggctccagacaaaatgatgaagggagatagcttttattgaccccagttacagtcagatccaggtgttgaaagctccttcgccaaattctgctgctttcctgttctctgctttgctttaatctctctcggcctcatcctcaatcaggatcttcccaaccagtggcaagtttgctactagcagtcacaggtttccctcctttccagcttctcaacccaattaggaaaagtaacattttttgttgttgtttgtttgtttgttttttgttttgttttgttttttgagacacagtctcgctctgttgcccaactggagtgcagtggcatgatctcggctcactgcaacctctgcctcctgggttcaaacgattctcctgcctcagcctcccaagtagctgggattacaggcttgtgccaccatgcccggctaatatgttttgtatttttagtagagatggggtttcaccatgttggccaggctggtctcgaactcctaagacttcaggtgatccacccgcctctgcctcccaaaatgctgggattacaggtgtgagacaccgtgcctggcctaaaagtagctttttctcaacaatttcagcaaaagtcgcagttggggctagcatagccttacttagattctgtggccatccctgaacaaatcactgagaccaagaggacgtgctgctctcctgggccagacctgggtccttttccctttcctggagtcagcagggtgggctcagccctgcctgaaccatatgaaaagagagccgagaaaggagccatctcagaagaagcccagtgaagacttggcaggcgaaagtggcacacggggctgggaacatggtagctatggtaagaaaagcaagggacgcgcatgtgttccgatagtgaaatacgcatatcaactgaattcacatccacgtttgtgttttccctcttctctcacatatgtctagtgcagtagcaaatatttttgcctgcttctttctattcaacattcaggaaatgaggctattcttagctcactcttatttggggctttcgaaacatgagacacaattttgtgtattttgcatagattttcttactttaccctgaccacaattctgtaagtccatatgcttttatttttatgttttattttatttttaggttttagagatgggggtctggctctgttgcccatgtggagtgcagtggtgtgatcacggcttactgcagccttgaattcctgggcacaagtgatcctccaactacaggtgtgtgccaacatacctggctaattttgaaaaaattttgtagagacagggtcttgcccagcctggtcttgaactcctggcctcgaacttctggcctcaagcaatcctcccatctcagcctcccaaagtgctgggattacaggcgtgagtcacctgacatgagtcacccagcaggtcatacatttcaatcataattttcacttcactgatgaagaaactgaggtgcagagattaaataacttgttcataggcacacaaaagttaattatggagatgtaattggaactgaggcagtacaattccagattccatcccttaactgccgtagtctgtgctgtgtctctggaattcaattcattttgaagataactctcatccagcaatgcatgacaaagtggaaatgtcccctcagaagtagttccctttggccgggtgcggtggctctcacctgtaatcccagcactttgggaggctgaggcgggcagatcacgaggtcaggagatcaagggcagcctggccaacatggtgaaaccccatctctactaaaaatacaaaaattagctggggctggtggtgcgtgcctgtaatcccagctacttgggaggctgaggcaggaaaatcacttaaaccagggagttggaggttgcagtgagcagagatcgtgccactgcactccagcctgggcaacagagtgagactccgtctcaaaaaaaaaaaaaaaaaaatagaagtagttcccttaaatggtaccaatttgcacattagaatcaatttgttcagtgtgtacgaagcccgtgactttaatggtggtttcctctgggtggtcctagaagactatcctggttacaaaagaaagaagccccatttacttcacctcataccccatgaccaccccacacccataagggttttcagtcagcagacatggccactccatggagcagctggggcaccgctggtctcagagggttgaggatgacagaaacaactcgaactggtttcggcaaagaggggggatttcttggcttaggtaaccaaatctgagggagggaaggggtgtagttgtcttcagggtgatggaatgcagccagcagctgtctctctaccacttgagtctgcatgttggtagtgagctgtcatgcaaggcttccccatgaggtcagaatggtgctattctcaggttatccatctgcaaggagaagacctgcctcccttgtccttagaaggctcttcaccagcctggcttgggtcacatgcccactcccatggccaaggcacccagcatactacaataggtgacctttgtggggatacgggtgagaagaagcagtccctaaaataaaagccagggtgagttttcccgaagcagcagggaggagtgccacacagatgaacccattcatacccaccttgcaccacatcctgtgttgtggggtcttaggaactccttcctggaagaaatagcctgtgtgacagggccttgaaactaagcaggagcttgctgaaaagaggaatgagaggggccaggcgcagtggctcacacctgtaatcccagcactttgggaggccaaggtgggtggatcatgaggtcaggagttcaagaccagcctagccaacatggtgaaagtccgtctctactaaaaatacaaaagaattaactgggcatggtggcgcatgcctgtaatcccagctactcaggaggctgagtcagaagaattgcttgtactggcacccagtaggcagaggttgcagtgagcagagatcacgctgctgcattctggcctgggctacagagcaagactctgtctcaaaaaaagaggaatgagagaggaacgagcatttggcagacatgcagaggtctacagatgagtagtttattctgactggcccgtggaggcggtggtggtggaggtgggtaaggtgaagcatggctgcaggggaggccacagggaactccacaaggcctgaacctgacctcgaaggtgcatgtgtaccttggatgggtacagtggatataaagttttgctcacccggtgttcactcttttatgaacaaaatacccttttccttttggagagcaccctctcccaccctctcagtccatggagcctatgaggcctctctctccagctcctgtgacctctacctggtcaatagaagtcactggctcagggatggacatgtgacccaatctgggccaatgaggggcagccctaggagttttgctagaaggattgcagactattcctgctagcaaaataagaccaatagatctctaattttttttttttttttttttttgagactgagtctcactctgtcgcccagtctggagtacagtggtgcaatcttggctcactgcaacctcctcctcttgggttcaaattatgctcgtgcctcagcctcccgagtagctgggattacagtaatggaccaccatgccaggctaattttttttgtatttttgatagagacaaggttttgccatgttggctaggctggtctcaaactcctggcctcaagtgatccgccctctttggcctctcaaagtgctgggattacaggtgtgagacactgtgcctggcctctgataaaaatttttggggggttgagtccaggtacgcatgaagccaactacccctggacttttcaactacatgattcagtaaacaacttttatttttgtttgtttgatttcgctttagcaatcagcatttctgttgcttgtcatggaagagatgtctctaaacaggagactgatggagttagacttgtgttttggaaggatgtccttcttgggatcggagaatggtatggaaacagcaagcaagagtggagacagccaagcagtgaagaatcaagggcggggtggactagagccatgtcacctgggggatatatcagtgtgagagatgagaaatggatgcacaaaaatggaaaacaagagagatgtggggactcatttatgggcagacgttgatctccacaagacatggtgactatttggatatggagaatacagaagagggatgagtcagggattacttgacaagggcccaggagaggggctttatctgtcatgcctatttcagatgtaagtgatgaaaaataaactcaaattggcttaaacaaaataaataggaatgtaataggctcaacatctgtcaagttcaaggagcttcagtacagttggatccagaacttctaatgattttatcaagatatgacctttatgtctgtgtttccttttttttttttccttgagacggagtttcgctcttgttgcccaggctggagtgcaatggcgccatctcggctcactgcaacctctgcctcccggcttcaagggattctcctgcctcaacctcctgagtacctgggattacaggcacccaccaccatgcccagctgattttttgtatttttagtagagacgaggtttcaccattttggttaggctggtctcaagctcgtgacctcaggtgatccacctgccttggcctcccaaagtgctgggattataggcgtgagccgccacgactggccatgtctgtgtttctcagacctgctttcctctgatgtggtttcatcctgccacaggatctcccctcaaaaaggtaaagatagctgccaacatctcagcacctgggtgctaccagctaagagacccagaggaaacagaacacttctatctcaatagttccaccaaagttccaggcccaaccatgagtcaattcctgagatgctgattggtcagacctgggacatgtgtccgttctcacatcaggaagtgatgtgatctccacttacactgcacaggctgagagtggggttggtctggatccccaaggaaaatagaaagtgctagaatcagaataaagggggaatagatgtggggtgggaaaaccaacagaggctcacttcagtgtgcatgggatacatttctgagtaatatgggagggtggtttttgtctagggatctacagaatgtgtgtttgtgtgtggggtggggatgaagggttgtctttaaggagcccagcagcattgaggattggtctgggatggaggcccagggtttggaggcctggatttggctgctattttacattttattttattttattttttgagatggagtttcactctttcacccaggctggagtgaagtggcataatcttggctcactgcaacctccgcctcctgggttcaagcagttctcctgcctcagcctcccgagtagctgggactacaggcacataccaccgtgcctggctaatttttgtatttttagtagagacagggtttcaccatgttggccaggctggtctcaaactccttaggtgatccacctgtcttggcctcccaaaatgctgggattacaggcgtgagccactgctcctggccttggctactattttagatagggcagttgggaagagcctcttttaggagatgacatttaacctgaactccgcagggtgaaaagagcttgtcttcatcttcatgagggtaagggggatgatttagaggtaggaattatcttgggatgatcaaagaacaaaatgatgactggcgagacgagaacatggtgcacagtggggagccgggaggcaggatcttgtgggcttagtcagttcctcattgaacactagtatggaaagccatgacaaagtgttaagcagaatcagtaaagcacagtgtcactcgacctttgaggattaccagaaggaggacaggccaatcgtaagcctgatcaagagaagggaaggaggaaggagaagggggaactttctctgtcaccttcccgccctgttgaggcagttttcatacgttggatgtttaacacaacccaaccaagactgggacccggtgcagtggctcacacctagaatctcagcactttgagaggccaaggtgaaaggcttgagcgcaggagttcaacactagcctgggcaatatagtgagaccctgtctttataaaaaaatagaaaaattagccaggcatagtggtgcatgcctatagtcccagcaactcaggaagctgaggtgggatgatggctcgagcccaggaggtcaaggctgcagtgagccatgatctcaccactgcaccccagcttggcgacagagcaagaccctgtttcacacacacaacacacacacaaagattggtatggtcactcttactttactgacaagaaacctgcgtacagaggagctaaaccaccatcccaaggccataaaactactgcgagtctaagccaggatatgtctgaatatgaagactcctctgaatgctgggtcccagaagcactaagcttggttatgaacctcatgggctctacatagcttctcaccaagttgggtcctgttgagcctattgtgcaaggaaggagaccaaacaccctggaggtttgctcacctggcctgagttacctggccgtggaaggcccctgggctcaagttccctgagaggcaggggttaaaccatgtgtcctagaacctcagcttgcatcccaccctggaattttcctctgagttgcaaaatcaggcaagctgccaagccatatatacattgccgggtagccaggcaacaccgtgctttttctgggaaggagcacaatgtggtcactgtgctgccgacgccaggttccagatggaagaaagactttaatccccagcttcacggctgtttggcacacttcgctcctgaaagcctgctcgggccagttttcactctgactctccagtgaggccattttgtctcattccgtttctgatgtttaaatgttaatcctttacaagttggttttagtggagtaggaaatggcggagaaggctggaggtggattcagatgcaacagggatggcacttacacctttcgatgaaaaagacgtgtgattccgcgattttgcagttgtgaattgtgctgctatacgcatgtgtgtgaaagtatctttttcacataatgacttcttttcctctgggtagacacccagtagtgggattgctgggtcaaatggtaattctacttttagttcgttaaggaatctccacactgttttccatggtggctgtactagtttacattcccaccagtagtgtcgaagtgttccctgatcacaacatccatgctaacatctactgttttttgattttttgattatggccattcttgaaggagtaagggggtattgcattgtggttttgatttgcatttccctgatcgttagtgatgttgagcattttttcatatgtttgttggccatttgtatatcttcttttgagaattgtctattcatgtccttagcccactttttgaagggatttttttttttttttttggttactgatttgtttgagtccattgtagattctggatattagtcctttgtcagatgtatagattgtgaagattttctcccactgtgtgggttgtctgtttactctgctgattgttccttttgccatgcaaaactcttcagtttaattaggtcccagctatttatctttgtttttattgcatttgcttttgggtttttggtcatgaaattcttgtctaagccagtgtctagaaaggtttttccaatgttattttcgagaatttttatagtttcaggtcttagatcaatcaatgagtgaataaacaaactgtggtatgtatatatatacgatggaatacttctcagccataaaaaggaatgaattaacagcatttgcagcaacctggatgagattggagactattattctaagtgaagcagctcaggaatggaaaaccaaacattgtatgttctcactgatatgtgggagctaagctatgacggcaaaggcataagaatgatacaatggactttggggacttgaggggaagagagggaggggggcgagggacaaaatacaacaaatatggtgcagtgtacactgctcgagtgatgggtgcaccaaaatatcacaaatcaccacaaagaacttactcatgtaacctaataccacctgtaccccaataacttatggaaaaataaaataaaataataataaaaaaagaaaaaatgtgtgagcaaaatgattaataggcaaatgatagaagaaaaagaaaaagcccatgaagttagaaagagaggcatcacttctcgagtgaacaggaaatggaaatcaggaccacataatgtcaagtttaactctcagagtgatgtaaaaatgaaaatcctagggctgggcatgggtggctcacacctgtaatcccagcactttgggaggctgaggcaagtggatcatgaggtcaggagtttgagaccagcctgaccaatatggtgaaaccctgtctctactaatgtgcaaaaattagccgggggtggtggcacacatttgtaatcacagctagttgggaggctgaggcaggagaatcacttgaacctgggaggcagaggttgcagtgagccgagatcgcaccactgcactccagcctgggtgacagagtgagactctgtctcaaaaaaaaaaaaaaaaaaaaaaaaatcctgataaaggccagtgttggtgagggtgggcagagtaagtgtctgctgtcatacgtggcaatgggagacatttagggtatgacctctctgaggtgattttatgggacttgccaacattttgactatgtatgacccccccaacacagcaaatgtgtttccactaattaatcttgcagaaatactcagagaagtgcacattttaaggcgagaattgcaaaatattggagattctctgtctatcaatatagaaatggtaaaataaatggtgttgcatccataccattgaatcttttgcagaaaaggttgatgcagagatgtgtgtttcagcataggaggttgccttgcctgggacatactgttgggtcaaatagggaaaaaaattaagttagtgaatgatatatagagtctgaattcaattctgttgaaagagtatatatgtatatatatgtttgtatttacttatatttttaaatacaccaagaacatttctggactttgtattttttttttttttttgagacagggtcttattctgtcacacaggctagagtacagtggcacaatcaccccctgtggtctcaatcaccgcctctggtctcctacctcagccccttcacctgtggagtagctgggactgcaggcgtgcaccaccacgcctgttttttttttttgttttttttttttgtaatgatggagtctcactgtgttgcccaggctggtgtcaaactcctggggccaagcgatcctcctgccttggcctctcagaatgctgggattataggtgtaagccaccatgctcatccagaaaaataaaatattaatactggccatcattttaggattaaaaagttgtcaaaaatgcactgttggttcaaaaaacaacaaagggcaagttgccatgctgtatgtagaatattattttatgtctataaaaaagacactgtgtgtgagcatgcatgtgtacacacaaacacagatactatatatacatcctttgtacaaaaatttagagaaggtaaaagcaagaaaaccttgctagtgattggccctgtgggattgggagaatatttttgcttttttgctttctatatttctatatagtttgaagtttctcaaaggttgcatttttttaatttaaaaaaattatttaaaatacctttaagaaactgccatagtcctactaccctaacaggagtaattttagcaattttctgtatgaatctctccctctctatatatatctttctttctctatacccccatctatatacacacatatacacctacccagtaagtgagttgttatcccttaaaccccctcccatgggagagtccccccttttctgagtcatcagtgtccattataccactctgtgtgcctttaggtacccatagcttaggtcccacttataagtgagaacatacagtatttggttttctgtctcagttacttcacttagaataatggcctccagctccatccaagttgctgcaaaaacattatttcattgtttttcatggcttagtagtatattccatagcatacaaatataccatattttctttatctacccattgactgatgggcagttaggttgattccatttcttcgcaattgcaaattgggctgcgataaacaaatgagtgcaggtgtgacttttatataatgacttttttttttttttttcagatggagtcttactccatcacccaggctggagtgcagtggcttgatctcggctcactgcaacccctgcatcccgggttcaagtgattctcctgcctcagccttccaagtagctgggactacaggctcccatcaccacgcctggctaatttttttttagtatttttagtagagacagggtttcactatgttggccaggctggtctcaaactcctgacctcatgatctgcccacctcagcctcttttcctttaggtagatacctaatagcgggattgctggagggaatggtagatctacttttagttttttgggaaatctccatactgttttctataatggttttactagtttactttcctaccaacagtatctcagcattccctttttaccacatcccctccaacatctattggtttttgactttttaaaaatggccattgtaattgaggtaaggggtatcccactgtggttttaatttgcatttccctgaacttctttttttttttttttactttaagttctggcatacatgtgcagaatatgcaagtttgttacacaggtatacatgtgccgtggtggtttgctgcactatcaacctgtcatctaggttttcagccctgcatgcattaggtatttgtcctaatgctctccttcctcttgctccccagcccctgacaggccctggtgtgtaacgttccactccctgtgtccatgtgttctcattaaaacttcttctttttaaaaacagttttgctgaggtaaaatgtcatcaaatagactctgcataaagtgtacaatttggtaagttttgacatctgtctgtacccgtgaaatcttcaccacaaccaaggtagtgaacgtatccatcaccctcaaaaatttccttttggccaggcgccgtggctcatgcctgtaatcccagcactttgggaagccgaggcaggtgcatcgcctgaggtcaggagtttgagaccagcctggccaacatgatgaaattccgtctctactaaaaaatacaaaaattagccaggcgtgatggtgggtgcctgtaatcccagctacttgggaggctgaagcaggagaatcgcttgaacccggaaggcagagcttgcagtgactagagatcccgccactgcactccagcctcggtgacagagcgaaactccatctcaaagtcagcagcaagaggtcaggagtttttactccctcttcaatgttttattcccaatatttagatcagtgcctggcatatagtagatagtcaaattgtaatttgaataaatcctagcttccttttgctacaccaaggcccacagctcctgctggtagctttacactaagaacgactgcggtctgccaagatcatgtgtgcacgtgcctccgggcagctgcatccaaggacgtgattaactgctaagcccccctggatctatgcattccttggtcagcacattttcttcccagtaaagaggctacagacccagcaatgttatgtaatccccaccacaccccatgtgagacaaatcctctaatcatttcagatgaaagatttgaagcacagagccattaaggatggatcaaggttggacatgaaattggcgtggttttatgcagtggatggtaaccaggacccaaaataggattcaagagaagtctatttgggggtggagcagtggaggcaggaacccaaatataagaatgtcatgctgtgggccatcagtcaatggcatttggggtctaggggtgagagaaggatctgggctacagctggcgtaccctgatggcggctgggcctgtggctgtggctgaattatctcagaagaaatgaattacctcagaaatgataaaggaggattaggaccatccacacccttggtggaatgcctgagctctggtggaagcaatatctgttcagacggatctcagctcagtacgcaagaaaaacccaccacaatggcttcaatgagtaagggatttatttttcttctgtaactgggggtggactgtcatagctcactgacttcatcagggattcaggctccttttttcttactctctccgcctttcatagcacacggactttcataacacacagacatcttcctcatggctgcaaaacggctgtggcgcttccaggcatcacatccgtgttccaggcagaaagaaaggggaaagaccaaaacccttctccttacaaagctttgctttttatttgagaatggatggcaaaaggattttcacccacgtcccactggccagaactgtctcacttgccccatttatacagctgcaagggtttctgggagaaaatatttttgactgagcacattgctgctgtggacagaatcagaggttgttaacattaaacaagagagagagtggaatgcagagcaggaaggcaagcagaatgtctggcacagtcagtagcaaagtgaggagagagcttcgagaagaggggtctaagcaggatcctggaagtgaggtgggtctccagagggagtgctgaaggtattttcatttcaggaggcaagatctggaggagcgttgggaagggaatcgaaatagctctcaaatgccctcactgccacccactaatggagacatgatcgttccccttctgcagatggcagaatgaagtcttacagacgctaacaggcccttgtcactgtggtaacttcctgaagcatttatatacttgaataagtagtcaatacacgtgatacaaaccttttatttaaagcacaaaagaatacgtattagtgaattttccttcccatcgctgtgtcccagctctcttccctggaggcaacgacggctaacagttacagttgatcttcattatttgcagattctgtgtttgcaaatgtacctactcactaaaatgcatttgtagcccctgaatccatatgcacaatgttttcatagtcatttgtggatgtgcgtagagccgtgaaacattcgagaccctcactgtacaggttcccagagaaggtggaccgaggtctccgccttcttgtctcagttctcatattgtaaacaactgtccttttggccgtctatttagtgccacattttttgcactttggttggtgatttggctgttaaaaatggctcctaagcatcgtgctgatgtgccgtctggtgtccgtaagcgcagaagctatgatgcgtcttatggaaaaaatctgtgttagatgagctttcttcaggcacgagctatagtgctattggccatgagttcaatgctaatgaatcagcaatatatattaaataaggtgtctgtaaccaaaaactcacataaagcaaggttttgtgtgaatcggttgatgaaaatgcaggaacctgagtgtgttaaccttttttttttttttcattttctgtatttgtgatgctttgacatttgagaatgtgctgatcccagagagcctgcctcttccagggccagccagttcctagagattgaaacagtaacctaggagtgcacctctctcatgcaaaccggtcagtctggaaaccttccttcaaaccacatccttcaactaccacctttgtggggctcccacaagtgacccacatcccccatgccctagtattgcctcaagtccaggtaccagacaactagtggcagctacaccctggagcctgctgaaattattccaatttgccaatctgaaggctgcctacccccaactggttccttcccaaggagaccataataaagtcctgtgccttcctttctcctcactcctctgtctcccggccaaccctggtgcttccccatgttcccccatgtggcatgctgtgcctctgggttccagggatctgtgtctatgaatctgttccttcacaacaatcatttctgtgcctgcctttttttttttttttttttgagacaagagtctcactctgtcacgcaggctggagtgcagtggctcaattttggctcactgcaacctccgcctactgggctcaattgattctcctgccttagcctcctgagtagctgggattacaggtgcccgccaccatgcccagctaatatttgtatttttagtagagacagggtttcaccatgttgaccaggatgatctcgatctcttgaccttgtgatctgcctgccttggcctcccaaagtgctgggattacaggcgtgacaatttttgtatttttagtagagacagggtttcaccatgttggtcaggatggtctcgatctcctgacctcaagtgacccacccacctcggcctcctaaagtgctggaattacaggtgtgagccaccgcgcccagcctatgcctgtcttaccatgcctgattataccaaatcccaggaacatttcaacactgaccctgtatattccctagaagcaatggttccatattgctaattcagtgtccacagtgacgttatagaacacatagctaccctgaataatcagaatcgactgtttgtatttatccttccagagatgttctggacctgtgccaggtaatagatttctttctatttctttttttttcaccacataaatgtatgcacattatagatgctattttgcatgttgatttttttaaaaaattgacaaataacaattgtatatttccatgggctatagtgatgttttgatacatataatgtatgatgatcagatcagggtacttggcatatccatcacataaaacattgatcatttctttttttatttttatttttattttttgagacagggtctcactccgttgaccatgctggagtgcagtggtgcaatctcggctcactgcaacctccgtctcctgggttcaagcgattttcctgcctcagcctcctgagaaattgggactacaggacaggggcccaccaccatgcctggctaatttttgtatttttttagtagagacagggtttcaccatgttagccaggatggtcttaatctcctgacctcatgatccgcccgcctcagtctcccaaagtgctgggattacaggcatgagccaccgcacctggcctatttttattttttgagacagggtctcactctgctgcccatgctggagtgcagtggcacagcgatcacagctccctgcagcctcgaccttccaggtgcaggagatcctcccactgcagcctcacaaatagctaggactacaggcacatgtcaccatgcctggggattttgccatgttgcccaggctggtcttgaactcctgggttcaagcaatctgcctgccttggcctctcaaagtgctgggatcacaggcttgagccaccacacccagctgccacaatgatcatttcttactgttgggaaacttcaatatcctcttgctagcatttggaaatgttatgttattgttcactgtagtcatccgcagtggtatagaacactagaactcatccatcttgtctgcatcctagtttttaaacctaaccatgtgtcttggtgattgcccactgtgttagcttgggtcttccgagaagtaggcgccaaaacaatattagatgtgtaggggatttattagggaaaagatctgtaagggaaaatgaggaatgagctggaggagtctggaaaagttattgaatttggatgccaccacacccgaccctgttatcactattttaaccctaacttgtacaccaccaggagttccagtggcagtttgctttgtgaccagtttctctctttcacaatcaccacaggctatggatccctggacatctttctagtccttggcaatctctctcttccagtaccaatccacaggcattccatctttcccagggtgaacagggctatccaattaattccccttcttgcaggacttggcattatagcccataggggaactggaattgcctccttaacctatagccagctctcgaaggaaatagccaacaacattgatgccatggcttgaaccttcgcaactgtgcgagaacaaatagactctagcagctgtagtcctcagaaatcattgaggactagatatgttaacagcagcacagggaggaatttgtttagccttagatgaaaaatgttgcttttgggtaagtcaatcgggaaaagtacaagacaacatcagacctggacggattcgctgctggtaacatacttggcccatattttgcccataacagcctggcccagggctgggtggtcgagtagacaggcctcgggtggcaaactgcagtgctgggaatcggaccagttcacctgattcccggggggctgcctttggtattctgaacacgccgccaggcacaaagcgctggatgttgggtgtctcgttcacctctcactgccttctacggatttcaacacatagcatcatgatgggaccacagctctgagaatgacagaagcaccgatctccatatcacatgactcctgagtagaggaaaatggatttgagctaagggcaggtgaattaaaaagttggtgcaaatcaagacaaagcagtttgattgttaacacatggcccagtttccgaaggcaaactcagctcatcagcctactgtgggattttcccctaggctgaaaagccaggtttgattccaataaacgtatacattgcagtgtaattaggcaagggaacagggttcttggagccacaaagccccatggtcagtatttgggtgacatctacttcctgactgtaaacagatttaaatataccatctgttttgcagatatttctcagaacctgtttttaatcagtttttctctctaattttcggatactgacaatcttgttttctttttctttatgtgttttaaaaaatgacataaaccagtattgcttttatttttttcatgtgcttggcttgattattttaagctaatttatataccttcattcgttccgtaacagccaaaagtgaaacttttttttcctgtttcttttgtcatcaaggcacaaagaataacagctttcaaaatagtctttggttttgtcctttaaatggtagaaggtcatcattttgttttcgcttttgtatttctatttctgatagataaatagacatagaaaaaatgatgtacagaagttggctaaattgtgataatatactctttaatttctgttaactttggataattctaataatgtttcttcttgttttgagtttttttgtttgtttgtttttgagacaaggtctccatagagtgaagatttactctgtcactccctggagtgtggtggtgcaaccacggctcactgcagcctcaacttcctgggctccagtgattctcccacgtcagcctcccaagtagctgggactataagcatgcaccaccgtgcccagctaattttttgcatgtctttatagagacggggttttgccatgttgcctcagctagtcttgaactcctgggatcaagtgatccaccgccggcctcgacctccgaaagtgctgggatttcaggcgtgcaccactgagcccagcctgggcaaattcttatgtgggggtcatttattaccatgtctgttattggatcactgctatttgacaatttagggcagaaatatcagaaaatagggaggccttggaggcttcctcttgttcgtgctgtgaactgttgggtgtgtgctcacaaattccaaatgaggacggaataaattagctcggttttgggatgccattcgaagctcctttataaaacttggaaagttgatttaagagatatttctctttcattgttttatttttaattacaaaagcagtagattttttttggataaagaaattagtttccctttcacattccaaaccaatgttcaaagatttgctggtttctgcctccttctttctgcttctagagctgcctcatgatccaatgtggttcttctaattatttgcttaaaaatgctcttaatgttttttgcctaaccaacttatttttaattttgcccaccctttgccattccctacccccaggcccgtacgtctttgcccgattgctattgaggtgcacatactttcagcagcctgtgccatttcacagggcaccacgagcaggctggcgtcggcctccttcattgatgccaccagtcactttttattacctgcctacgttccagaccaggttccctctatttcctgaagattaagaccctctgagtgtcactctgccctgctaaatcagttccgctcataatcctctgcttagaaatatctacagggtggactgggtcacgaccgacatcaccatctgacagctgttacaactccgtgcccaaactaaacttttcactaaacacttctttaggggacaccaaggacctcctcccagccctgccaaattaactcactgaatacccatttgccaaaagctggttctccaaatgatcacatttttaaaacttcccaatttgctggtttatcccaagttgtttttctcaaaacaacaacaacaacaacaacaaccccgcccacacacacacacattagaaacatttcatttcacttctttaacaaatgtttgtggggtttttactacacacaaggtgccaaagtgttggggttaaagtagtgagtaagagagcaaatgttctcatcctcatggaactcccaggccggtggaggaaacaggcaagaaggacataaataaatatgtaacacaggtggtcatggaaacatgtagagcaccctgaggcagcaagaagagtgggcatcaaataatataataacatatatgatgtagtatttatatagtataatactatgtgatgcaatacaatgtataatgtacacagtataaaaaataccatttgcagccgtaaaaaagaatgagttcatgtcctttgcagggacatggatgaagctggaagccatcattcccaggaaactaacacaggaagagaaaaccaaacaccgcgtgttctcactcaagtgggagttgaacaatgagaacacatggacacagggaggggaacatcacacaccagggcctgtcggggtgtgggggaaggggagggagagcattaggacaaatacctaatgcatgtggggcttaaaacctagaagacaggttgatagtgcagcaaaccaccatggcacaggtatacctatgtaacaaacctgcacgttccgcacatgtatcccagaacttaaagtaaaattaaaaaaaaaaaaagacagttgactcttgaacaatgtggggagttaggagtgctgagtcctgtacagttaaaaatctacagataggctgggctgcagtggctcatacctgtcactccagcactttgggaggccaaagtaggtggatcactggagcccaggagcttgagaccaacctgaacatagagagacactgtctctacaaaaaatacaaaaaaattagccaggcatggtagtgggtgcccgtagtcccagctattcaggaggctgaggtgggacaatcgcctgagcctgagaagtcgaggctgcagtgagctgagatccttgcaccactacactccagcctgggtgacaggcagagtgagacctgtatcaaaaaaaaataaaaataaaaaaaaaggaaattcatggagaactttggactctccccagacttagctactaatagcctaccaaagaccagcagccttaccaataacacagtcaattaacacatattttgtatgttaaatgtattatatactatactcctgaagtaaagtaagctagagaaaagaaaacgttattaagataatcataatgaagaaaaaatatgttcactcttcactaagtggaagcagatcatcttaaaagtcttcatcctcgttatcttccattaagtaggcagcggagaaggaggaagaggaggggttggtcttgctatggcaggggtgtcagaggcaaagaaaacctgtatataagcggactcgcacatttcaaacctgtgttgtttgagggtcaactgtatagtatataatgcaatataatatgtaatataggccaggtgtggtggctcacgcctgtaatcccattacattgggaggccgatgtcgggcagattacctgaggtcaggagttcgagaccagcctgaccaacatggagaaaaaccgtctctactaaaaatgcaaaaaattagccgggcatggtggtgcatgcctgtaatcccagctactcgagaggctgaggcaggagaatcgcttgaactcgggaggtggaggttgcagtgagctgagatcacaccattgcactccagcctgggcaacaagggcgaatctctccgtctcaaaaaaaaaaaaaaatatatatatatatatataaaatataatatataatagatatgatataatgtaatatgtaatgtagtactacataatactataatatgtaataatatagcatataataatattgcttagggagtagacttttagtgttcttatcgcaaaaacaaaagtatgtgagataatgcatatgttaactagctcaatttagccacttcacaatgtacagattttacaaaacacatacacaataagtacatctaatttttgtttgtcaatttaaaaataaaatgttaaagaaaaatatgccataaaacagaacagaatgtaatatcatctaatatgtgacatgatgatatgatacggtcatgtgttatgcaatgcagtaatgtgtaatatggtttagaataatacagtgacctggccaggcatggtggctcacgcctgtaatcccagcactttgggaggccgaggcaggcagatcatgaggtcaagagatcgagaccatcctggccaacatggtgaaaccctgtctctactaaaaacacaaaaattagccaggcatggtggcgtgcacctgtagtgccagctacgcagtaggctgaggcagaagaattgattgaacctgggaggcggaggttgcagtgagccaagatcaggccactgcactccagcctgggagacagagtgagacaccatctcaaaaataaataaataaatacaatagagtgacctaatgtaatttgttgggtggtggaaagagtagagcaggtggagggagtggggagtagtgcagaggcggctgatgtggtcagctgatgtagtcaggaaggctcctccaagcaggggacaactgccccaagacccgaaggatgtactcattctaccacagcaagattctgggggaactgcagagggaaccggaagggcacagtctccctgcagaggcacagaacatgctcagggaatggagggaagcttggtgtggtgggaatggagtgaacaaaggggagatgggagaaggtaagagtaggctgaagaagagcaatggatctcatgggacctcatgggacctcgcaggcacaagggagccgtctggatcttgttcccagcacgatgagacccttggatcttcttcaatgttgtgacgtctggtttctggatctggttgcccctgatcctcagtgtcccttggtttgcagccacagggctccaagctctgcctctaacatcacaaggcatgctcctccctgcatctctgcgtgtcctcttctcttcttattgggacacgagttattggatgtgggaccttccctcatctgctgtgacctcatctaaaataatgatatctgcaaaaattcgatttccaaatgaggccacattctgttctgagtggacatgaatttcgggggaccccgttccacctagtacagctaggaattggcatgggctggacggagtgagtgtgggtagaagtgagaaaatgctcactgacatggaaggaaaacccagagagtttgggatgtgcaaaccaaacgaggaaagattttagcagagaggacgaggtctaagttgtcatgtgtggtcaacaattggatctgatgaagactaaggactggattgtttctggcaaagtggagaatcctggggaacttgacaagagtaggtcagtgtgggttgggaatggaagccagatacccatgggctcgggagagagggaggggagagagttgaggggaaggagcagagagatgccttggatgtgttttgcctatgaaggggcagtggctagggaggaacttaagatctaaaaagcatttgtttttttaagatggaagacaacacagtatgtgggaatgttgatgggaagatctcatgcagagaaggaaatagatcggttgatgccagcaagagaagatgacaaactgactttccgatgagccacaagtgatgggatgcgctgttcagggggaggagttggaaagaggatttgccaaatggacaatttgccaaattatggatccactgtaaatgaatttctactaaatatttgtaaacattacacaaaatcatgccaccatgggatggtgttaatggacttcaagggtaactcttctctttcttttcttttcctttcctttcttcctccctctctccctcccttccttccttcctttcccttccttccttcctttctttcccttccttccttcctttcccttccttccttccttccttccttcctttcctttcccttccttccttccttttcctccattccttccttcctttccctcccttcccctctttctgtctttctctctttcttttttccaagacagagtcttgctctgttcctcaggctggagtgcagtggtacgatcatggctcctgcagcctccacctcctgggctcaagcaatccttccacctcagcctccccagtagctgggatcacagttgcacaccaccacgcccagcaattttttgtagagatggggtttctccatgttgcccagactgatcttgaactcctgggctcaagcaatcctcctgcctcagcttcccaaagtgctgggattacaggtgtgagtcactgcacccagccagctttgatgttttagtttcatttcagctgaaattaaatttggtttcactgtagattttgtttcactttggcagatttatctcagctctgtagctgatttgcaaatcaggctcaaagacgcatcagatttaggtgtaattctcattataggcactgagcatttctcagatgtcttacccatgttgaaaacatttgtgtgatcacactgggtaacatatctgttaagagaatttcaaaagacaggagtgaaaatgagttggataatagaaacctgttctaccttttgtattacgcttggtggaagcatcccgaaattctcattttaaatataaaaatcctcagaacacactgaacttcagtttggctacaatgaagcagctacagccaatgtaaagctaaactaaaatctgccaaaaaaatgaaacgaaaacttcaagtcagatcatttaaacagcacagaagtttccaggaactcccttacaattgggatcgctgtagctgtcacaaggagttaaaggaaacatgcttctgtcgctgttaactagctgcatccggtgaattgggcaaatttggccattcagggaattaaccatccacaaaagtaaataaataaataaataaaataagccagtcatttgaagaactgattttcagggaatttatttagcgttggtaatgtctaaaagttacatgtgtggttgttggttttatgattatctttaatgcattccgatgtatatttatatatacgatcttctccatgcctgacatatttcacggtaagataaagaaattcccgtggcttataaggaatggagactgaatttgaattcaagttgtttagaaagaaatggatgagcactgaacccacatatttgaattttttaaaagtccagctgacagatgttgaatcagcttatccccctgctggagaattttgccccaaggtaaaagcaagctttgatttcagcaccgtatgcatcgcagtgaagttgggcaaatgaatggtgtcttccatacacagcactacgtgtttggcatacggaatccctcccttgcccagcagtaaacagacttgaatacaccatctgtttgcacaccaactgtttgcaaggaaattttttttccttttctttttttctctgtgaagttaatgttgtgacaactttatattttctttttttaaaaaaacagaaatctgtgtttgtgtttacttagacctgggctaccttagatggttctcaggctcacttatacactttcatgtgttccattaaaaaatgtgatcgctttctttttcttctgattttggttgcaaaggctaagaactttcagaacagaattttgtttttgtctttaatacggagacgtttcgtgttgttctctggtttttcagatgggtggacacagaaaagacaactaataccctgaaattggttgaaacttgattattcattcttaaagtctgataattataactgtccagtaacttgataattccagttctgttttcctgtttagaacctctactttcttatttgagaaaaaatgtttgaggatgttatctcagtatgtgtttacttatcttagtacacattcccttgaacttttcgcttatcatgaccattgaaatatcttggaacatcagtgttagaaaagcaggaagaacgtgggaaactccccctgtgtgcacggtgggcccctctatgaattgcaccagacaaattccaaacaaagtgatggagaaaatcccccaagaaaattagcagtcttttttattcaaacttttttattcaaactttttgttgtactgtgtcaacagctctctggagaccaccgtgtgcccctcctgttccacagccaccccaaagcaactgttaaagatgttttgtgggctgggcacagtggctcacacctgtaatctcaacactttgggaggcggaggcgagcagatcacctgaggtcaggagattgagactagcctggccgacatggtgaaaccctgtctctattaaaaatacaataattagctggttgtggtggcaggcacctgtaatcccagctactcaggaggctgagacaggagaatcgcttgaatccaggatgcggaggttgcaatgagctgagattgcactccagcctaggcaacaagagtgaaactctgtctcaaaaaaagaagaagaagaaaaggaggaggaggaggaggagaaagaagaagaagaggaagagggagagggagagggagaaggagatggagaaggagaagaagaagaaggaagacgaagaagaagaaggagaagaagagcagctaccttgacagggacgtccaccttggaaggtgacatgctctgggtgaaaaggaaagttggttttattccagaagtggcacccctggggaggcggtgaacagtggaggcgtgttccaagaccacctctccacgtgtgcctccggatcagggaaattaggggagcttaaatgatggtcaaagtgcttttgggaaacgtgcacgggctcaggcggacagttaatcgcggcttccttggtcaatgtccctggccttctgcaggaatgctcaagctgttcttatcagggcggtcagcacattcccagggtggctggtcagctgctctctcttttatctctgttgaaggccttgttctccggaggctgtttttaataaagaagctacaaactcgagcaaagcaaggattctatgcaagcaagcaagcaagcttttctctaacacggagtcagtactgtgacacaacttcactgtcttcatcctgtccaactcctcaccttggaaagcctcccctgcacccccattgtttaaaacaaccacaaaaccctctgcacagctttcttccccgagtcctcctggtgattctgcacctcctgggtcttctcattcactgaactgagtgggttccttctcaaaacctgacctttaaatacagacgtttctgaaggactctgtccggggctccttcccttccctctccacatcctctccttggtggatttcatgggccgcttggctttatatgccgtccatatgccccagactccctgctgtagactgactgtgtgcacccattccccattcttatgttgaactcttaccttcactgttttccacaatggctgaactaatctacactcccaccaacagtctgtaagcatgcccttttctctgccaccttgccagcatctattatttttttactttttagcagtagctattctgactggtgtgagacagtatctcattgtggttttgatttgcatttttcttaatgatcactgatactgagcttttatatatatatatacttcttgacccatcaatcccattactgggtgtacacccagaggaatataaatcattctatcgtaaagacacatgcacatgtatgttcattgcagcactattcatggtggcaaagacatggaatcaacctaaatgcccatcaacagtagacaggataaagaaaacgtggtacatatatgccatggaatactatgcagtcataaaaagagacaaaatcatgtcctttgcaggaatatggatggagctggaggccattaaccttagcaaagtaacacaggaacagaaaccaaataccacatgttctcaattataagtgggagctaagtgatgagaacacatggacacatagagggggaacaacacacactggggcctatggtggaggatgggaggagaaagaagatcaggaaaaaatagataatgggtactaggcttaatacttgggtgatgaaataatctgcacaacaaactcctgggacatgcatttacctatatcacaaactgtacatgtaccccaaacttaaaagttaatgaaaaagagaaagaaatgttgccctctaaggtgatggtgttaggaggcgccttccaggaccgtctactctaagaggatctcctgggttatttgctgtgtctgcttctgtggtctggccttcacaacacttagtacagttcctacttattttatttactggcctatttcctgttttttgtttctctctatgacataatatgaaatggccgggcccagtggctcacgcctgtaatcccagcactttgggaggccgagatgcgcagattgcctgaggtcaggagttcaagaccagcctaggcaacatggtgaaaccccgtctctactaaaatacaaaaagaaaatcagccaggcgtggtggcaggcgcctgtaatcccagctatacaggaggctgaggcatgagaattgcttgaaccctggaggcggaggttgcagtgagccaagactatgccactgcactccagcctgggcaacaaagtgaaactctgtctcaaaaaaacaaaaaaaaaaagaaagaaatacatatttggtttctgctcatgttctgggcacacaggttcgaattgaaaagtgtatttgtttgctagtggtgactgctactaggggctcccggacagcctcaggttgggggtggttgccggggaaatcaaccatgtgattagagggttggagctttcaggtccctcctcgccacgttgaggagaaaaggagaggggctgaaggttgttgatcaccaatggccagggatgtaatcaatcatgcctacataatgaagcctccataaaaccccaaaaaggacagggtttggagagcttccaggctgctgaacacgcagaagcgctggtggggtggttcgcccagagaggacatggaaacgtctcaccccgtaccttcgtaactacagcctcatcctcctgatgcgatttcactgttatgcttataggacttaacacgttaatcacagccctttactctctgtacacactaatcaccacacagcaaggaatatttacataccacatcaacaatattaaatcctcattcatgcaagaaaataccccaataccgatacacctaacaccccttctcctattatccttaaaccccaaaatgattttgagttttacatgctgttgttatagtttaaccaaaacattagatcgtggatctaataacagaagtctacaatttcttatctaccgagaaagtatgcaagaactggtaactcatgccccaatatataacaatatggcattctcaacttttaaaggattagagttaaccattggtctaaggaaccaaaaacactggtgcaactccaaataaaagtaacaagtacattttcctcccatactgtaacacccctaatatcactaattttaccaactgctgctaccttaactgacatctactgtagtgatttgtaccccaattacgtaaaatcatccattgcatgcacctttgccattagcctcatcccaacaacaatattcatatacacgagccaggaatctgtcatctctttataataaatggatcatctaagtaacgtggtttcctgagttctgtgagccgctgtagcaaatgatcacacccaagcagggcatcgtgggaaccctgacttataggccataggtcaaaagtacaggtcccaactggggacttgcaattggcatctgaaatgagggcagacttgggctgagctctggcctgggcctgtgggatctgactctaactccaggtagtgtcagaactgaatttaggccaggcgtggtagctcatgcttgtaattctggcattttgggaggctaccttaggcaggaggattgcttgagctcaggaatttgaaaccagcctgggcaagaaggtaagaccccatctctataaacaaaactaaaaaaattagccgagtgtggtagcacatgcctatagttccatctacttgggaggctgaggcaggaggatcccttgagcccaggagtttgaggctgcagtgagctgtgatcctgccactgcactccagcctgggggacagaatgagactctgtctcaaaaaaataaaaaaataagaactgaatttagttacgggacacccagttgatgtctgctggaaaatatagagtagaaaaaaaaaaccccacacatttggcgtcagaagtggtctgtggtgagagtacagtaggagaataaacagttgtacatgttcccttcctggaaaagttatttccctgcactgagggcctgcattaattaggataggctgatagcactgcggtacaaacaatacccaaacttcattgatttcttattcactctatgttcattttgagtcaacagagagctctcatcattacagtcactcagggtcccaggttgttggcacatctaccatctcagtgtctactttatggaaaatccagcctgccacactagacttgccaaccagagcttctaccatggtgtttccatgtggcttgggcttcctcacagcatggcagcctcaaggttgtcaaacttgttacatagtggctccagattccaagtatgagcgtcctagtaaataagacggggatgcatggacatttatgaagcaactcagaagtcacatagcattacttcctaccctgtgggtgaaggtagtcatgagcccacccagagcgggtacatagaccccacttctcaatgggaggaacgtcaaagtcacattgtagcagagaatatggaaagaaagatattgtcatggtcgtttttgtaaaaccgtctgccatgacccctgtctctcctggctctctccctcagcttcgctggccttttttttttcttcacttccttaaatgccctaagtgctttcttacttccaggactttgctcctgctgttcgttttgtgttgtggtgctttttttccaggagcacttcttcccaacacctaaagcactcagcttcctcatcctccttcagtccttacaccatcagagaagacttccctgaccgccatagttgggcctgtgtcccctgatactatctttctcagatactgatttgtttccattgtaacacttagtgtaatttgtaactttttttaattgattatttgcttttctgtattatttccaacacgcagaaaaaaatatatagggaataatatagtaaacacgacacccagatttatcaaatctttacattttgccatatttatttcagagcattttttttaaattaggcacaaatgtaggtgaaggtccttgtgctctctttgaaataccacccacgttcctccaacaccgacatttggaattgatcattctcatgtctgttcttcctacattgctgctgaaagtaagaaagggtgttgtaacatgttccaaacctgtgtgagtggcattgttctgcaaggaggttgtaatgttctacccttttatttttagcattttgttaagttgtgtggctccgttcacagcaggtgcaccaccatattccaatttaggaattcaccctgttttacacatccatctcctcctaagcacatttaggttggttcttggttttactactgcaaatgaagccacacacccccacagccttgcacagtccctggcatgcagtcagcactcaaataagatttgtcacatacatgaatatcgtgatgaacattctactctgtatctctttgcccagatgtggggaatttctctagaaaacatttctcagcacagaactgctgaggggttgaggatgtgcttctccacctgcctagatattgtcaaattacattctcaagtggaagtttctttatgtctttctcccatcaaaatgaaatttccagaattcagaaaactcgtctttctccccgccccccgccatatttctgggtctcacagtgttcttgatgtgtagagttgctcaataagatttctagtcctgtgttgtccaatacggtgtccaccagccatatggagctactaaacccttgaaatggggccagtgccatatgttgaaataatattttgcatatattgggttaaacaaaatatatcattaaaattattttcccccttttttacatttttaaatatgactactagaaaatttaacatacgtagcttgcattacatttctcttggacatctctagagtatgtataaatgaatggatgagtgtattattttgactcaactttgggattagaatatgtttttgaggtctttaaccatggaaaattttgtctcccccggggacattgggccatgtctggagaaatttgtgattgtcacagctgggaagaggagggctgtcagcatctagggagtagagaccagagatgctgcagaacattctacaatgcacagagtggccccccccagcaaagcgtgatcagaccctccgtgtccacagtgcgcaggctgaggcactctggtctatatcaaggcttatattcttattcttatcccattaaatatatcatgattttaaatgttcttcgaaaaccaaatttgtttgtaaaggaagacacttacttttgtttgacagtaaaatgctatcccatctttgccattaatgttcttgtgtaggcattgtatataatttttttcacattttcttaattcacatcgcaatggtactctacagacacgtgtgattttttatgtatttatgtagaccagaagtgggcttgtatgtgtttaattctgctgtgtatttagctctgaagccttcctagttctctagaaaagctgcgtcaacacatacctgctgttaactcagggaagtgtctgtatcttcaccctttcaaccaccctagatatttcatcaccagatttttcatctttctgagtcttgtggaaatagatttcatcacattttggttgttatatccaacttttgtttctgttgttgttattttgttgtttggttggttggttttttttttgggttttttttttgagatggagtctcactctgtcacccaggctggaatgcagtggcacaatctcggctcactgcaacctctgtctcctgggtttgagcgattctcctgcctcagtctcccgagtagctagaattacaggtgcgcaccaccactcccagctaatttttgtatttttagtagaggtggggtttcaccatgttggccaggctggtctcaaactcctgacctcagatgattcacctaccttggcctcccaaagtgctgggattacaggcatgagtcacagcatctggcctatatctagcttttggagctcaaacattatgatgcatttttttcaacatttctattttcttttcttttagtttcttttattttcgtgtgtgtgggcgggggggggggctgtgtatatacacactctttgtctgcatttctattctgaagttctttttattttcctttatgacctactgacactctgtgtagtgcctgactttctttgagtatatattttgtatttttactcggctgtccatcaagtcttattcatgatggggtttccctgtaacctaactttttagtatttatggagatggatttatcagtattttcttttatatccactggcttgtttgttcattttaatggaaagtttcccaccgtatgattatagaaatatccacctatattgtcttatggtgaggtgagcaaagaagttctctacatgctctgaatattccttctgtcctcaactcaaatgcatcctcagagtccttcagcaaccaatttcagctgctaaaagcaagatatggaccaaaaccgaacatgatagagggttctactggagctgattatttctgagaaagagcaaatgatctctgaaaactagctgttaggatgttcagcttggtccagttgccaaacaaaaccccagggcaactactcaccacggaattttcccccaattaataacctacgaatgcccggcttgagtccaagctccatatgcactgacacccaactcaggaaggcaacggttttcccagaaacagcacaacatagccagtagttgggagacaaccatttctaaaccatagaaaagacttcatactagctatctgtttatagattgtgttcctgggtcatgtccataactggattttctctggtgttctgggagcaaaaatcttctgtcttctttttgaggtgagtagagtcttccaaatgtccttcatggccccagcccaccgttttctttatgtaggaaggttttagatgttggcacatattgacacctacttgcagacaggtttgttgaattacattatataaacgttgaaataataactcaagcagtgagtacattttcactcttactcccctgcacctagctttataaatcgctaaatacatgcattcagagaatctgtgtgcttttctcaacagctatgttgtgtaatggtgaacatcattatgcaaacacagctgcaaggcaagttccctagctcccagcctcagatcagaccttcattcccaggtcccttctacgtggaagttctggagtccacctgctcacagatgctcacaaagcactggcgggacatctaaagagtaataggaacccacaccgatgttctaagcaaggatgggacgtggccagattttcctttgataaatctactcagactcacacgagaaaaattaactgaagaccaggaatgatgaaggaggagcccagtgtagaaatagatggtcgcaggacacaggagagagacgatggagacagggatgaggtgggacagtcagggagagggagagatgcatccacgaataaagttttattggaatacagccccattcactcattctatattgtatatggctgccttcacactacaagggcggcaatgagtagctgagtcaggtgccgtatggcccacaaagactaagacatttactacgtgcctctttacaggaaactttgtttacacccagcaaaattgttccacataatgattcagaaaagcctaatgattcagaaacttttgttgacccagcttcgaggaaaattccacagagctcacttcctgcatagctggcactctcttgggtcatcatcactggtaggcttctgtgagaacagcggaatttatcctaagggcaataggaatggctgaaagagtcagcaggggatggcttgactccttgacctgtatgttccttcaaggagaaagagtagttagagttgtttttgcagtaacttgaacaagagatcagaagggcaggctgatgaaaaaccgatttctaaggcagaatggacaagtcttcgaaaattgattggctacagggctgcggagggagaatctagcacgggtttcatggttttgtttttgtttttttacaagacagagtctacgctctgtcatccaggctggagtgcagtggcacaatcttggcccactgcaacctctgcctcctgggtccaagtgattctcctgtctcagccgcctgagtagctgggattacaggcgcacgccaccacatctggctaatttttgtatttttagtagagggggtttcaccatgttggccaggctggtctcgaactcctgacctcaggcgatcaacctgcctcaggcctcccaacgtgctgggattacaggtgtgagtcactgcacccggccaggtttcatgtttttgcaaaagcagatgagaaacagctctcaggcatggatagtactcctatctctgggaaaagagaccctgtggatgtggatggacaaagattttctagaaagaggatgagtgaagggtgctgacctccaatggaggaaaaacacaattccaaaaggaaagaaaggctgaccaggcctaagcagggcgtctctcctttcctttcccccaggattcctttaatgggaagggcagagtccccaggaagcaactcttggggaggaagaagaacgaagctcccaggcagctttctaaccactcacctgactccacctatccctgggaggagtccctgtctccatcccctaaatggagagcagaaaaacctacggctaggctgggcgcagtggctcacacccgtaatcccagcactttgggaggctgaggtgggtggatcacttgaggtcaggagttcaaaaccaccctggtcaacatggtgatgccccgcctctactaaaaatacacaaaaataaatggggcatggtgttgggtgcctgtagtcccaagggaggctgaggcgggagaattgcttgaacctgggagacggaggttgcagtgagccgagatcgcaccactgcactccaggctgggtgacagagcaagacttcattaaaaaaaaaaaaaaaaaaaaaggaagaaagaaaaaaaagaaaagaaataacaagtattggcaaggccatggagaaattggaacacttgtgcactgttggtaagaatgtgaaatggtacagctgtttcagaaaacagtatggcagttacacaaaacaattaaaaataaaatgaccatataatccaacaatgccattgctgggtatacacccaaaagaattataagccgagttttgaagagatatttgcacacctgcattcatgacagcaatattcacaatagccaaatggtaaaggcaacccaagtgtccattcatggattgatgggtaaacagagatgtggtatagccatacaatagaatattattcagccttcaaaaaggaaattctgacacatgctacagtgtgggtgaatcttgaggacattatgctatgtgaaacaaatcagtcacaaaaagacaaatattgtacgattccacttacaggaggcacctagagtagtcaaattcataaagacagaaagtggaatgctggttgccaggggacaggaggggggaaaatggggagttgtggtttaatggatacaacatttcagttttgctagaaaagagtcctgaagctgaatggtggtgatggtcgcacaacactgtgaatgtcctcaacactactgagctatatatttaaaagtaattttgatggtaaattttaggttatgagtactttaccacaattttttttctttttttgttggagtctcgctccatcgcctggccaggctggagtacagtggcacgatcttggctcgctgctatctccaccgcccaggttcaagcagttctcctgccttggcctcccaagtagctgggattactggcattcaccaccacacccagctaatttttgtatttttgtagagacagggttttgccatgttgacctggctggtctcgaactcctgacctcacaagatccacctgccttggcctcccaaagtgctaggattgcacgcatgagccaccacacccagcccacaatttttttaaaatgtaaaacaacaacaataacaactaaaaaaacctgcatccatgagatgaacctgaaaagaaaatatctgttgcaacacacaaagccagtcaacactcttagatatggtggaggcagctttttctctgctgaaattaagggaatgagtgtcctagagaattctcaaagatgtgtcaatgtttctaacaggagttgcagctttttgcctcaaagttaaggacagctgcaccgtcaaaccttgaccatgaatgtttagggtgggttacatttgcccagtatttgtttgactctgttgaataacatcgcagatagatggttttcaacaggcagaagagttttttgtttgtttgtttgttttatctcttgtaggtttttccataataacaaacccaagtaaatcacgacccaaccagtgactggcaaatttagtgcaaactcttcaatgctggttccacatttggcacctggcttggattgatttgccactgagttttgtaaatatttccctcagcttttaattcattctttataaacaatgttgtttaaataaaggatatttgtgtttctcattctgacgttttcttttcaacgtccacttgatgagtataatgtctcccatgaaatttttatttgtagagtaaatattcctttctgtctggtctagtgcatttttatttgaataatgtatcatctgagtaaacatagccttctgtgctctctaaagccttcatcacgttggagggcccttaatatatttattcagtttaaaacttgtctgatgtaagtaatgtcattctggttgaaaagcatttacaaacaaaacaatgatatgccaagctttaatgtttacaaagattagcctggatctcataatagattatttattgtcattgcatattcagtggttttttttctgtaaatattattgagattacactttggaaaagaaaacattactagttttttgagtgttgaatggaatattgcccaactcagcagatcacaatgaaacctcatggttcttatcaaaatcaacaaatctgttgaaatgaatttaatgctaatgtctttgtatgtgatttgctgacctacaaaatgtgttttagttgcttttatttatcttttctttctgcttttaatttcttatttggaggagtcttggttctttttttagtttgtttgttttttgttttttgagacagagtctcgctctgtcagccaggctggagtgcagtggcgtgatcttggttcaccgcaacctctgcttcccaggctcaagcaattctcctgcctcggcctcccgagtagctgggattacaggtgtctgccaccaagcccggctaatttttgtatttttagtagagacggggtttcaccatgttggcaggctggtcttgaactcctgacctcatgatccgcccgcctcggcctcccaaagtgctgggattacaggcgtgagccaccgcgcccagctgagtcttggttcttataattaaaaaaaagtcttctgcaactgttttcattttctacatcttaatttttttggtggtcataattatttttcttatcatcatgactttcttccacatcaatttcgattatttttatattttgaagcacctaccattcttttttcagactaaaatttggcttcctaggatacttcctttttggcacatttgaattctgatgtgattgatatttttgaaaaaaaaaaaaaaaagaaagaagaaaaaagacccagaaaacaaaaaatctgaaattagatcatacacaaatgctttttgaaattgccatgacattgtatttggtggtgctgaaaaattgtgtgatcagagtactcttttgctatcatgattgatgaattgatgggttgaatgaatgtgtacaggaatttagtcactggagcatctgcttcttgttccactcttcagcatcagagggaaattcttatgtgacattttgcctggaacccccagactccctcaggaccgggcaccttgtgacatcttcatcaacaggtgtcctcactctttgtagaactccaccaagttggtctcaagtgaaacagggatgcagctaaattcgaggttacagttttcctgggatgttatcatcacaaacaccatgctagtgagttcattcctaacagaggagaacttgcatcttgactaagcattagtgatcatcaaatcctctgcttatgatttttaaacttctgatcttcagaatatttttccatgagctagctctggctttgtgcatctcaaaccttgtttctctcccatggctgtcatacttctggtgccctgagatgcagaatttatttctacttgatacacacatttgggtattgatgtagggttagtacagcaggtaggttgagaatttctggagcctccctccctccctttgttccgacctttccttagtcatatcatcctagaaagatcttccctggcttcgtctaaaacatggcctctcatttcattctctccctgacaaccctgatgtagttttcatttcaggactcatcaccccaacatcctttcctgtttacagcccatctcccctgctagaacacaagctctgagaggtggaaggcctctattgtgggttttggcgaatccccaatctctagatggtgtctggcatgtgatagagattcaacaaacacttcaacaaataatgaataaagttaaatttttcagagtgcaatcatgcctctcccttcctctgccagggcggaggctgtgcctggtttgcgcggcttctgcagctccagctccttgtactgagtctggagaatgatggagctcagtccattttaatcccatgaacattaaatgcgtggatgtgtggatgctgggatggatggatgacgctcctagcacggcagcttgcaggggattggcgatttccagtaaggtgtgctaagactcgaggaagcccattttctcttcatttgcaaggaccctgtctgataatgcaatttttcacacatcaatgctgtgcatgaggtgttgatggggtggctgtctgctggttccttcccccagcccatcccatcctccaaacagactattttgttgttagctgctctgctctgttcatccctcaagagctctcaccctctgccattgcaggggctgtctccatggaaactgtagccagcgtttccatggagaaagagcccgcagagtctggaattttccaggctctaaaggtgactgcaaaaacatctcagcacatctccagaactgggctgcccaacatggcggccactggccacaggtggcgactgaccacttgaaatgtggccggtccccgaagagacatgctgtcgtggcaaagcacacagtggattttgaggacttggtacaaaaaaattttttttaattgaaatatcgctaataatttttgtattgattagttttacctatcttttttttttttaaacagccgttgctagaaaacttagatttacatacatggttcacatttgtggctgaaattttatttctgttgggtggcattcttctagagtatgagtaactgaatacatgaatgaatgattgatttttggtcaaactgggattattatccataaaccgtcactttcctgcttttcttcttagatgatttgttttttaaatagttcattaagtatcttggttgaaagatttttttttttttgagacggagtctcactctgtcacccaggctggagtgcagtggcgtgatctcggctcacggaaacctccacttcccaggttcaagcgatttttttgcatcagcctccgagtagctgggattgcaggcatgtgccaccacgcccggttaatttttgtattttcaggagagatggggtttcaccattttggccaggctggtcttgaactcctgacctcgtgtgatccactggcctcctaaggtgctggggttacaggcgtgagccacacgcccagctgaaaggtttatagatataatttttagtattgaattaggctaggagttaattacaattctttgaacagccattgaaacaccactaatttttttttaaggaaccatctcctcctgagtgtaagacactgcatcctactgcagatgacgtcttgtacgtagattctacccatcagcttccaacatcttgctgtccttcacaatgttgtcatggctcccatgtagataggcaaaccttcctgattttcatgctgaccagatgcccagaaacaggatcgcggaggcaaagggtgtgtctccacactcggtgctttgataccaatgactcaaatacttaccagaaagactgtgcctacctactttcccactggcttcatctgaaggggtctgtctttatcacagcgatgattttttattttagttttgacttccagattttaaaaacattatggtgacatacacataacacaatatttaccaccttagctacttaaaagtgtgcagttcagtggcctcgagcacattgacattgttgtgcaatggtggtgttatcaccgccacccatctccagaactcttgcaaaacggacagaaagacaaacatggcatgttctcacttatttgtgggatctaacagttgaactcaaggatgtagagagtagaaggttggttaccaaaaggctgggaagagtagtaggagctggtggggaggtggaatggttaatgagcacacacataagaaatgttagcaagaataagacttactaagacctattagataacacaacagggtgactatagtcaatagtaacttaattgtacattttaaaataaagactgtaattggattatttgtaactcaaaggataaatgctttaggggatggataaaaaaaaccttgcaaaactgaaactgtgtacccattaaacaacaactccccattttccccactccagcccctggcaaccaacactctactttttgactctatgaatttgactacttttggtagtggaatcatatagtatttccttttgtgtctggcttatttcacttagaataatgtcctcagggttcatctatgttgtagcctgtgtcagaatttcctttcttttattcatttattcatttttttgagacagggtctcactccgtcacccagtctgaagtgtgcagtggcgtgagcacagctcactgcagcctcaacctcctgggctcaagccatcctcctacctcagcctcttgagtagctgggactacaggcatgcactaccatgcctggctaaatgttgtattgttttttttgttttttttttgagatggagtcttgctctgtcacccagactggagtgcagtggcacaatctgggctcactgcaagctctgcctcctgggttcacgccattctcctgcctcagcctccccagcagctgggactacaggcgcctgccaccacgcccggctaatttttttgtgtttttagtaaagacgggatttcactgtgttagccaggatggtctcgatctcccgacctcatgatctgctcgccttggcctcccaaagtgccgggattacaggcatgagccactgcgcccggcaaatgttgtattttttatagcgactgcgtttcacggtgttgccaggctagaatttcttttctttttaagactggataatattgcattcatggagagaccacattttactcatccacccatccatcactggacactgggtttcccaccacctttgggctatggtgaatattgacttccaattttgctttatcagaagattggagcatcttttcatgtttcttgaaagtttttgctgggtgtggtggttcatgcctataatcccagcactttgggaggctgaggcaggtggatcacttgaggtcaggagttcaagaccagcctggccaacacggtgaaaccccgtctctactaaatatacaacaaccagccaggcatggtggtgcatgcctgtaatcccagctactcaggaggctaaggcaggagaattgcttgaacctgggaggcagaggttgcagtgagccaagatcatgcctctgcactccagcctgggcgacagagggagactcgaaaacaaaaaaacaaaacaaacagttttgctttttctctttcatgaactctcttttcagatccctttctggcttttccaatgtgatgttcagttttaccatcttgacctgttagcacaattgcttgacccgagcaattcctttgactttacaccgcaatgatttcacctggtagattgttaaaccacatttgtgacaggagtcttcatgttcccacatttttagtgtttggatggtcagattgaacgcccttttattttgtgactgttgatgtttggattgttttgaatgagtcatttcccatcacatgattataaacatatcctcccaaatcctattttactgaatatgatttcttcagaaaagaaccctcttcctgctgtgcacaccatgcccatccctgcacccagaaactccagtcctcatgaaggcctccagatcccattgctgcaggagggattggcaccagatctgaattgcacctaggggtccctcgggagaacatgtctaattggaaacgtgtggttcttggaaaggagccgaatggatattgcctcctggcctggtcatcagattatattttagttcaaagactcaccgtggttgatattagctcagtgctcggctggaaaccaaaccctacgtacatctcctctctagcagggagcggttggatttcttggaaacaacttaatattggcctctgtgctgaagacatgcgtttccgaaccctgaaaatatcaaataccaggcatctcctttccagacgacatccttccctcaccttcgttagcttttctcctagttttccggggtggaacctcggcctcgtccctctttgatggactgggtgcctgtgttgagtcctggcccaaagctggtgtttttgtgtgcacgctgcagatttttaaacagaatagccatctgattctggatatgcttggctaacccaaattacacaatgggttgaaatcatggataggtcaatgagaatttcagggtttttttgtgtgtgtatacacgttcccacactcacactttcgcacacacacatacatgtattaccaaatattcgaggaaactgttttcattttcctaaaggcattatttgagtcaaagcattgtgtaaatgaatcttacaggcagcctctccccaatctgaatgcatctcacccccagcccctcctgcctttgtagaaattctgcacagcaaactgcttgcgaatcatgatggggaaggaagttttacttacagagcaaagggaatccacggaagtgatttaagcacgggagagatgcagtcacactttcctttgaggcctgttaatctctaggggaggaaataatttgtatttatgtacatatatgtatatgtgtatacatacatgcacacacaaccaataattattggtcaaagagaaagaacacttctagggttctggacctcaaagatccaaatgtctccccatagtctaacagctccgtgaaaaacatggcttagagcttgctgcgtgtccaggctttttttttccatgcttatctccacataaagttttacataaaattgggataccttatctgcagttttccatcttcctttttatttaatgcatgaacatttcaacatcaggaagtgtactttaaaatatggctttattttgaaggagaaaaagagcttgcctatttgtctctttttcccccgcttttatattttatgttatttttattagagatgggggtcttgctatattgaccaggctggtcttgaactcctggcctcaagcgatcctcccatctcagcctcccaaaatgttgggattacaggcatgagccactgcacccagtctttattttgttttattttattttattgtggtaagaacatttagcatgagatccaccctcttaacaaatttccaagtgtacaatacagtactgttttgtttttgagatgaggtcttactctgttgcccaggctagagtgcagtggcatgaacatagctcactgcagcctcaagcaatcctcccacctcagcctctctagtcgtctagtagctgggactacaggcacacactataggcacatgccaacatgcccagctaactgttaaaatcattttttagagatgggttttgccttgttgccgaggctgggacaatacagtactgctgactccaggtacaatgtagaacagcaggcctcacaagtttattcattgcgcttgactgaaatggactctgtttatgattaggaaaatgccacctgctcactggattcaccattcttggtgaagacggtttatagacttgactgcaaatgtgcgtatttcgtaaacaagactgcccaagtctcagtgatagacattctttgtacatttgagcgagtttccattgaggataaattcctggttatagaattaaaaagtggggcaaagaaatgaaatcagacacaaattgaccgattgctcaccacctataaggaggtaggggctgggatcaacttgtgtttttaaaggagggtcatggctgcttattggagaaggaccttgagggctaagcatggaagcctggagaccagggtgggaatggtccagatggtggtagcttagactagggcagtggccaagggtgcaaaatgaccggtgggacaggacaaagccttaaatgggaacagacccagggatagtggggagagatcctacttcttgaatcccttagagggttccagggaaccaggtccagatgtcagccagcatccttcccgccagggtatccctgatgcatgagctaaacagagtccaaatatatccagttaagtaaggaagagatcagccatggtggctcacacttgtaattctaaaactgtgggaggtcgaggcaggaggattgtttgaagccaggagttcgagaccggcctgggccacataacaagaccctgtctctacaaaaaaataaaaatatataaaaactagccaagggtggtggggcaggcctagagtcccagctactcaggaggctgaggttagaggatcacttgagtccgggagtttgaagctgcagtaggctatgatggcaccactgcactccagccaggacaacagagtgaaactctgtctcttaaaaaaaaaaaaaaaaaaaaaggcgtggtggctcacacctgtaatcctagcaccttgggaggccgaggcgggtgggtcacctgaggtcaggagtttgagaccagcctggccaacatggtgaaacccctatctctactaaaaatacaaaaattatccaggcatggtgtcgggcgcctgtaatcccagctactcgggagactgaggcaggagaatagcttgaacccaggaggcggaggttgcagtgagccgagatcgtgccattgcactacagcctgggtgactcaacgagaccctgtctcaaaaaaaaaaaaaaaaaaaaaaagagaaaaagcagatacgtgcggattcaaaaaccatcccagcacagagcagctgcatcatatatgtctttttgtacaaatggataaggatacctcactccccgccataattctatcagtaatagattgttttcggaggacagacaatgtcatctgggaaaaaccgctcctttagttcttcttatgatttcaattctgttagtggctctcaagagaaataactaagaacggtgaacaagaaaggaaagaggattctttcagctggttgtaagggcactggggagattgagccgcgtgatcacgtagatggtgactgggcgtggggctgcaccgaccgtgcccagcctcccctttagacatttattctccatgcagtaacttctattctttcatttgcagtaatgtagcaatcactgtgtgaatacatcctcgtcttagtctgttcgggctgctatagcaaaaatactatcgattgggtggattagaaacaacagatttttatttctgacagttctggagggaaaatccaaggtgcagcagatttagtgcctagggaagggccacttcctgctgtcttcttgagggagccctctggggtcttgttaaaaattaattaatcaattagtttttaaattgacaagtaaaatcgtgtatgtttatggtgacgacatgatgttttgaaatatgtatacattgtggaatggttatgttgatctaatcgatatatgcctttctacctccccccttttttttatggtgagaacactaaaagtctactgttttagcaatttttacattgtcatgaactatagtcaccacattgtacaatagaccttgtgagctctagggcctcttgtctaggacaataatcccatgatgagcctctaccctcatcatctaatccactcccaaaggtcccacctcctaatactatctcactgggagttaggatttaacatcaattgtggggggaggtggggacgcaaacattcaatctacagcaattatccttcatttgctccgtctcctcttgaggggcattctggctgctccccaccctgattttttattttggggatcagagtcactctgaatgtctcagacagtgcctcacacatcgcctcacacatcactctcaccttatcaatatttactgattggttgaaggttgcagtggacaaccttgtgtatgttcccttgcccacatgatggagaatttcttcaggtgatgtagataggggtggagccatggagaaagcacagtttttttttttttgtttgtttgtttttttgagacggagtctctctctgtcacccaggctggagtgcagtggctcaatctcagctcactgcaacctccgcctaccaggttcaagcaattctgctgcctcagcctcccaagtagctgagattacaggcacgcgccaccatgcctagctaattttttgtatttttagtagagatgggtttcaccatgttggccaggctgctctcgaactcttgacctcaagtgatctactggcctcggcctcccaaagtgcagggattataggcatgagccagcatatttgtttgcaaatagtgcagaatgtctttctaaagaggcattttccttgttttctcttggcagctctgtaagcaaggacctgctttacttttgctctctgccatctccccagcacctcacaccaagtctggtgcatacaaagtcctctatttgtctgtctcaaatatacatgagtgaatgaatgaattattttatgctccaaattggcattgaagtggatagatatatatctagcctgtctttctcatagcatatgttaccatgacatcaaatattcctccagaaatacttgttttgggaagaatttggtttgtgcatcaagactgcaggataaaaggatactcattgtatacacttgttgccaacttcttgctaatgtagacaaaggtgtgctaactcctctgtaccttcctgaatgtttgtgaatgtctgcagacagcagattcccagaagtagactggctaagtcaaagcacacatactttttaaattttggcacctctccccaaaatttggtcactagcatttgagaatgtccattttcctacaaccttccttactctaatattattcttgttttcgatacaaatagaagtcatttcgacaaaacaagtcattttgtcgaaatgacttctatttactttgagtgtctgttttggtattagaagtagggtagactcacgcctataatctcagcactttgggaggccaaggcaggcagatcacttgagcccagcagtttgagattagcctgggcaacatggtgaagtcccgtctctataaaaatatgttcttttttttttttgtattttaccggggcgtggtggtgcatgcctgtagtccctgctccttgggaggctgaggtgggagaattgctagaccacaggaggtcaaggctgcagtgggctgtgatcatgccactgcacactccagcctgggcgacagagcaagactcagtctaaaaaaaaaaaaaaaaaaaagtagtagtagggtggactgtctcttttatgtttattgcacctaaacatactctctggtaaatattctactcatagtctttgcccgtgtttctatcttggtgttcaacttttcctgagtttatattacatttatttatgtatataatttctatgtatctcatatgtttatgttagtgatacaaagttctggatcatcacctctatttttacatatttgacctgggcttgccatttaagtcttgtttgtggtggacgttttccttacacacaacacacacattttcaatttttgtgaagtatagatttattattttatattcgttaacttttgtgtcatatttagtacatctttcttcatcccatagcttcaaaaatattctcttcggttttcttgccatgactgcagaatggaggccacgagcccacttccttgccccaagccctgttccctactcacacggcgcgagcgctgccccccctactcagacggcgcgagcgctgccccccctactcagacggcgcgagcgctgcccccctactcagatggcactctagaactggaatgtcccacagagcagccgcaaaccacagatggctgttaagcacttaatatgtggctgctgtgaattgagccttgccacacgatgagtttcaaagacttagtattaaaaaagaatgtaaaaaatattattacaatttttatattgattacatgttgaaatgataacgtttttgaaacatggggtcaaacaaaatatatcattaaaatgaatcccatctatttcttttaaaagctgatagaaaataaaaatagtaaataataacaatgacttacaaaaatagaaatatctgcccaggcgctgtggctcatgcctgtaatcccagcactttgggaggccaagatgggtggatcctgagttcaggagatcaggatcatcctggccaacatggtacaaccccatctctactaaaaatacaaaaattagccggtgtggcagcgcacgcttgtaatcccagctactcgggaggctgaggcaggagaatcgcttgaacccaggaggcagaggttgcagtgagtcaagatcacgcaactgcactccagcctaggtgacagagcgagactccgtctcaaaataaataaataaaaaaaataaaaaatatataatatatgtattttatatatattatgtatataatagaacacttaaaatgataaaaatggctcatattataatctatcagactcaggtcctgcaagaagaccttggttactgcaggaagaatttgggctcaaataaatagaagttcagatggtagaaatctttctaactggagactcttggtctttgagaagtagtttgaatgtcaacatctcacccagttgccagataaaacctcggttcaacaacccaccatggaatttttccctgattaatgagctaaattctgtactggaatccaagcaatatatatgttgccatccaactcaggaagagactggctttctcggaaagagcacaacccacccagtgttctggagacctctatttccaaaccataaaaatattaaatactagccatctgttttgcagatcgcgtccctgatttccatcattcatcagtttcttttttcctccctctcgtttcctggggtgaacatcctgccccctcattttctgggttcccctcatgaggatctgttaagggacctggcatgaagctgctggttgtatgtgatgcataatgccagcctacttccactgaacaaaattctgttatacattcagagcaaaactaaacaaatgagaattcactaaaatttaataacagctttgttgagatagtcacatactatacaattcatcgtttaaagtacttataagtcaatggtttttagtatactcatagagttgtgaaatcatcagcacaatcaattttagaacatttagaattttagaacatttagatcatcccctaccaaaaaatcccatgccccttagtcgtaactcagcatttcctcccagtgttccccagccccaggcagcacatgaatctacttcatgtatctgtagatttttgcattttgaatcatatgatatatgacttttgggtaagattttttcacttagcttaatgtttttgagctcatctgtgctgtaacatgtatcagtacttaattcttgtttatggcagaataatatttcattgtatgggtgtgccacattttacatatgtattcataagttgatagacctttgggctgttttcacttttggctattatgactaatgctgctatgaacatttgtatagaagtttttgtttgtgtagatgtatgtttccatttctttggggtatatatctaagagcaggattactgtgtctcagggtaatgctatatttaaccttctgaggaactgctttccaaaacagctgcaccagtttacatccccaccagcatttatgaggatttcaatttctctgtcctcaccaacacttgttatagtctgtggtttttgactatagccatcataatgggtgtaaagtgacatctcactgtggttttgactcacatttccttggtgcctaatgatagtgagtatcttttcatgtgcttcttgggtatttgtgtatctcatttgccataatatccactgagaacctttgctgcttggtcacgctacacccaaccattttcgaaacatctgggctatccatgatagtttggatactgagtttatgtgggtacagtggaatcagaaaaaagaaaagttaccagagaatttagttggtaacgacaaatcctttggagagaaccttgacaggacttgctaatggacaacgtttgctgtacctgatcaggtcaactttgaagttaacagaggctgaagtgccggaatcaatccattccagaatgatttctaattaagggtgcaatataagatcactctggctacagggaaggaggcagaagaagggaaagggaaagacagggagatgccaggagacctagctggccactcactaaatctagatagaattagttaattcttccaatatgcttttattaatttatttataaatgagatacacagaaaaatgttaggtgcaaaataaaacacggaaaatttttcagaggataagatttaaaaaagtgaaaatggaagctccaataatttatttgcacacatgacccgttctgagacctcaaaggggtcgcagcatgcgatgaagttgggccagggtaacgacagaagatgggaaggttggggagttacgtggggtgagtggaatggctgaaggtagactctggagaaggatttgatttgatgtgctgatggacttggtttctcattgttggaaacgatgtgagaccaattgatggctgtagttgagaaggaaatgatttggaatgctcaggagggaggtctgggctgttggtggagggggacaaaatcatagagaagtgagttcgtgagtgtggccaggggactggaggagatgtcagtggggattaaaaaaaaaagccaagagctaacacggagtcccgaaagctcaacctggagacctggatgtgacaggagagcccccaggcctgggtctgcagctttctcagagcctgagatctacccagcaccctttcagcaatacttcttgtagatgccagccaccgctagtttctcttgatgcaactaagaattccaatgcaaacaaaatgcagcggctcacacgccctgctgtgctcccctctctgaggacctcatccaagaacatattttaagatatacaggacccattatctaagcacggatggagaaaactgcaggcttgagcccctcccccttgctgcctcaggagcactgattttctgtgaaggacagatgcagcctccagctgttgccatggaaaccagggctgcagagagtgaagttttccaggctctggagtccgttgtgtgtgggtggatgcaagatcccagcctggcatacagcaggcaactaataaatgtctgtagaaggactgaatgtttgtctcctcgactcccaccacacctcggcattctgtgctagaacaatcatcttcttgtgggcctgaaatctgtgaggttgaaattttgtaaaaactccctggatttattgagttataatttacatataatatgatttacctattttaaatatacagtttgatgcattttagtggttgtatacactcatgaaaccaccaccacaatcaataagcagagcatttaattagtctaaaaagtttcttggcccggcaaggtggctcacacctgtaatcccaatgctttgggagtctgaggtgggaggattgtttgaggctaggagttcaagaccagccttggcaacaaagcaagaacctgtctttacaaaaaaaaaaaaaaaaaaaaatcagctggatggggtgacacctgcctgtaatctcagccacttgggaggctgagatggaaggatcacttgagcctaggaggccaaggcttcagtgagctatgatcatgccactgcactccagcctaggctacagagtgagaacctgtctcgaaaaaaaagtatgtatatatatatatatatatatatatatatatatatatatatatatatatatatatatatatatatatatatatatatataaatttaaaaaaaagttttttattagtctgttctcacattgctgagactgggtaatttataaagaaaagaggtttaattgactcacggttccgctggctgtacagggagcctggctagggagaccccaggaaacttacaatcacggcagaaggtaaaggggaccaggcatgtcttacgtggcgggggcaggaggaagagatggggggatgtgctacacacttttaaacaaccagatctcgtgagaactcactcactgttatgagaacagcaaggggcacattccacccccatgatccaatcacctcccaccaggccccgcctccaacactgagaattacaatttgacatgagatgtagggagcggagtggatacagacccacaccatagcagacttttctgtgctaatttgccttggatcccttccctccctccaacccactaccacaccaccccgatctacttccagtctctactgttttgtgactttctagaattttatgtaaatagaattatgcaatcttttgttcaacttttttctcctaatgttttgagatactccatgttgttacatgtattaagattttactgattaatattaattattaaataattatattttattcctttttactgctcagtgatattccataatatggatatatcagtttatttattttcctgttggtggctatttaaactgtttccaatttgagggtcagggggtgcagttacagaattatacagctatcaacattcctttctagcaacattttaagatttgtcccaggtatttgcaaacctaaagtgttgtgcttttctcacaaaaacaatagacatcggtgtggatatggtgaaaagggatcactatacactgctgatgagcatgtcaattagtacagcctctgtggaaaacactatggaggtttgtcaactaactaaaagcagatctaccattccttccagcaagcccacgacggggtatgtacctgaaggtgtctttcatataaaagagacacctgcattcatatgtttattacagcataattcacaattgcagagatatgacatcagtctaagtgcccatctacagatgagtggataaagaaagtgttgtacatatacagcatggaatactactcagccattgaaaaagaatgaaatcgtgtcctttgcagcaatttggatggaactgaaggcccttactctttttcttttttctttttttttttctgagacggggtctcgctctgtcacccaggctggagtgcagtggtgcgatctccgctcactgcaacctccgcctcctgggttcaagtgattctcttgccttagcctcctgagtagctgggactacagtcgtgcaccaccatgcctggctaattttttgtaattttagtatagatagggtttctccatgttgtccaggctggtctcaaactcttgacctcatgtgatccgctcgccttggcctcccagtgtgctgggattacaggcgtgagcccaccgctaaaggcccttattctaagggaagtaactcagcaatagaaaaccaaataccgcatgttctcacttataagtgagagctaagctatgggtacacagaggcagacagagtggtataatggacagtggagactcggaaaggggacaggaagggagaaagggagggataaaaaaactacatattgggtacaatgtacatgacttgggtgatgggtgcactaaaagcccggacaacaccactatccaattcatccacgtcatcaaaaatcactggtattcatagagctactcaaataaaaagatttaaaaaacaaaacatagactggcacacacacaaaataatgtcttgtactttttgtttcattcttgccaattggatagaaggaaaataaatggtctccctgttgacatggctgcccaatttttggattacaaatgagatgaacaatccttcatcgttctttgaagtgactttctctctctctctctctctctcgtgttttttgtttgtttgtttttgtttgttttttttgaagtcttgctctgttgccaggctggagtgcagtggtgtgatctcagctcactgcaacctccacctcccgggttcaagcaattctcctgcctcagcctcccgagtagctgggactacaggtgcacaccaccacacccggctaatttttgtatttttagtagagatggggtttcaccgtgttagctgggatggtctcaatctcttgacctcatgatctgcccacctcagcctcccaaagtgttgggattataggcatgagccaccacacctggcctctttgagttatttttaaatgtacaaataaattattattgactatagtcacccaattttgctatcaaatactaggtcttattcaccctttctaactatttttctgcacccatttacaaccccacttgccccccaacccccaacccatactgccttgtgctgaagaagaagatgagaccattggcccctccctggcccaaacaccattcccccattccccccacattgaagcgcccagacctacaaggaggctttcagctcccggtcctgcatgaggaatttggaccaaatccaaatagaaaatggggtcagaagggaatgacatttctaactgaatagccacggtccctgagaagaagcagttacaacgtcagctgccagataagacgtcgggtcaaggacccaccgtggaacgtccccttggttcctaagccaaatgcccagctggaatcccagcaatacacatgttgccttcagcaagggaatgattttctcataaacagcacagcctggccaaggttctggagacctctgtttctaagccatggaagtattttatcctgggccaggcgccatggctcatgcctgtagtcccagcacttttggggtccgaggtggttggatcgcttgaggcctgggcaacatagaaagacctcatctctacaaaaaaaaacaaaaattatccgggcatggtggcacacccctgtggtcccagctactctggaagctgaggccagaggatcacttgagcctagcaggtcaaggctgcagtgagctgagattgcgcccctcgctccaaactgggcaacagggagagacactatctctaaaaatatatataaaataataaaacaaacaaacaaatattttattctggttgtcattttgcggattatatcccctggtcccgtcagtaatcattttggggcagttttttttgttgtttttttgggggtaggtgtgaaaatctttccgcttcataatattccaggcatcactgatgttcagccataactccccccacccctgaatatgctcatggaactaaatttccataacttgttggattccgtgaattaccaaaatcagtaagaatggacttttaacacttcatcttagtctgaattaagttcacacacatagctgtctgcacagggttcgtctgccttttcccataacaattatgtcagcacgacctcacagcaaagaccacattgctccctgtcatgggctgaaatgtgtgcccctaaactcacgctggaaccctactttccagcacctcagagtgtgagcatatttgaagatggggtctttacagaggtgatcaagttggaacaagatcattagtatcatctgtgtctcctgattcactatggctggagcagccaggtgtggtggctcatgcctgtaatctcagcactttgggaggcggaggcaggcagatcacctgacatcaggaattcgagaccagcctggccaccatggtgaaaccttgtctctactttaaaaaatacaaaaagtagccaggcgtgatagtgagtgcctataatcccagctacttgggatgctgaggcaggagaatcacttgaacccggaaggtagaggttgcagtgagccgagattatgccattgcactccagcctgggtgacagagcaatactccatctaaaaaaaaaaaaatggccaaagccctgatcaagagaggagatgaggacagaggcacatacaaagtgatgaccatggaaggacactgggagaagatggctgtgtctatacgctgaggaaagaggcctaaagagaaaccaaccctgctggtaccttgatctctcagccttccagcctccagaacagtgagaaaatgaatttctgttgttgaagccgccccgtctgtggtgttccgttgtggcagtcctggcaggttaatgcacgtacccaaccagagtgccccaaacccttcctacgtagcaattctggagcttagacagtctgtggatcatagtaaggaactaggtctttatctgacagtgacatgaatctgttgacgtgttttagcccgggcagtggtcacggatgccttttcttttaagacagtccatgttggctccactatggatgaaagccagggctggtgcatggcagagacacacacagaggagatttgggggacacaggacagagaggataggtgcccagacgaggtggggtagggggaatgacggagacagagctggctcaggggatgtccaggaggcagaactgacgaggcctggacgctggtgggattcggtgggtggcttatttcatgtgtccacctggccaggctccaaaccccacagtttccgtcaaaccctcatccagctgtggctgcgagggcattttacagatgcagttaacatctacgatagctgactttcagtgaaggagatgatcctggaggatgtgggtgggcctcatctcatcagttgaaggccttacgagcaaaaactgagttttccctgaggaaaaataaattccacctcaaggttgcagcattagctcctgcctgagtttccagcctagcgtcagtcagccccacagatgccatgcctcccagacttcaaaatcgtgtgagcgattgccttacaatgagtctcttaaaacagtggtttgcaacctttttggcaccagggatcagtttggtggaagacaattcttctgcagaccagggtggggagatggctttgagatgattcaagcacattacatttgttgtgcactttatttctattattattacactgtaatatataatgaaaaaaattatgcaactcaccagaacatagaattggtggggagccctgagctcattttcctgcatgctcccagctgggagtgatgggagacagcgacagatctctaggcattagattctcataaggagcatgcaacctggatccctcacacacgcagttcacaacagggttcgtgctcctatgagaacctaatgcggctgctgatttgacaggaggtggtaatgtgagcaatggggagaggctgtaaagacagatgaagcttcactcactcactcgctcacccacccaccctcacgtcctgctgtgtggcccagttcctaaacaggccataagccagtatgggtccatggcctgggggttggagacccccatctttaaagacaaaaattatatatatgacatatgtgatatatatatgatatatatacacacatatgcgtgtatacacctattatcaatatccccccacacatatatacatataaatatgcatgtatttcaccccatacacatatatgcttatccccccccacaaatatacttataaatatgcatgtatccccccacacacaaatatacatagaaatatgcagtattccccccaaaacatatatgcatgtatcccccacagacaaatatacatataaatatgcagtatttcccccccaaaacatataaacatgtatccccacagacaaatatacatataaatatgcatgttatgtcctacttagtctgctagggctgccataacaaagttccacgtaccgagtggctgaaacaacagaaatgtgttttttcacaattctggaggctggaagcttgcgatcaggtgtcagcagggctggtttcctcggaggcctttctctttggcgatcagacggccgccctcccggtgtcctcacgtgggctttcctcggtgtgtgtctgcatccacacttcctcttctgttgaggaaaccagtcctattagattgaggtccatcctagtgacttcgttttagctcagatgcctctgtgaagaccctatccccaaatacaatcacagtttgcggtgctgtggggttaggacatcaacatatgaattcagggagtctacagttcagcccatagcactactgggtttgtttctctggtaggactctgacggctacaggaacaggcaccatttctgccttaaggaactaggtggacaacctcaatccctgagaaagggaaggatttttgaaagcataatgggttcaacttagctgggtggagacctcctaagaagaggtaagagtcttgttctttctctgtaaaaggaaaatggttttctaacgttttactgttccagagaaagacaaaacgcccaacctccatttacatctgtctcagcgcgcctcattaattccctagaaagaactgctggaagttgaattactgggtcaaagaggataagaggtcctcgtgatttggttatgttactgagttttgttccaagtcaggcagcttggccataactcctgtttatttatcactgcatttctgtttaatcattttcactgcacagatagcatatcaatttttacttggaaattgaaactatatatatttttacaatttatcatcctgtattttccctcatgaggctgtccccatgatgtaaaatgatccaaaattttgattgcattgtccggaggaaaggcatttgttattttctcttaatcattttagtactgacttttcatacgcccttcttgtgctttatagtcttgtttccaagcacttcattttacaaacatgccgtgatgttccccttctatctgcgccctgtgcctttgtgtactgggactcattttttggggggagacagggtctcactctattgcctaggctgatcctgactgctggcctcaaacaatctttctgcctcagcctcccaaaatttgggggttacaagcaagagccatggtgcccagcttgagttacattctttaaaaatcaattcattgcatttggccttaatgggaagaccaaagcgagatgtatcatgaacttgaaaactacagtattgacaacctgtttatcagaaaggttcagaaaaattcctctcccaccatcagtatctcaaaccatccccacctcaactttgcttcctggtggtattagcaaattcaaaggtggtgaacatgaaagacatgtgaaatgttacagtgctgtggagatacggtatcgctagtcatttatgaatccacctaccatcattcatccattccacccatccacccactatccatccatccattatccattcatccatccatctatccatccatcctctgtccattacccattatccattcatccttccatccatctatccatccatcatcccttatccatccatccatccatccatcctccatctatccacccatccactcatctacccatccatccactcatcctccaactatctactatctatccatccacccatcaacagaggagccacagagggaagtactggggctggtcaggaagcagagggagtgagggggaaatgtgagcaggagccttttcgttatttccaagggagggaacgggtgaagcagagtgggcaggcttaggattggctcctgtgagtgatttcagtggctctgggtcacaggcactgtcctggttgtctggttcccaaccctgggtgatgaaggcatgcacacagaggccctgagtgtgggagcccaatggacggggtgctgggtgtgggctctggatggggtggtttgcatgtgaaaggcaccatctcaggggggttgtttatcatctttaggaaaatgtaaagaatcaaagtacagaaatttacacaggcgtggttgatgcaccggggagtggaatgggtcagcccaggcgaggatggggcatgttggacagacgcagctgggtgtggaggcaggacactgtcagaaaaggctcctcatggctcctctctccttagcggccctcccttcagcttctcaatctttaatgtgcattctaccccactctgggtctgatttagcaggtctggctggtgcctagtattctgcatttctctctcttttttttttcaagacggagtctcgctctgttacccaacctggagtgcagtggcgccactgcaacctccacctcccaggttcaagtgatcctcccacctcaaccttccaagtagctgcaattacaggtgcccgccaccatgcctggctaatttttgtatttttagtagagacagggtttcaccatgttggccaggctggtctcaaactcctgatctcgagtgatctgcctgcctcggcctcccaaagtgctgggattacaggcatgagtccccgcacccggccattctgcacctctagaaagctcccgggtgttgagaatgacagactttgatggtttgcctgagacgctctccattttagcagggacccaaggagcccccggccccgggcaaaccaggatggttggtggcttcactggtgacgctgctggtactggtactgggccacattttgagcagaaatgttctgttggagtctgcccttcccaaggcaggagctcagagaaaaaggagaaaattttcactctgttccctgctctgctcgggctgacctttcctcctggtaaacatcgtgttttctcctttacgcaacatgccctcaacccacctgaggccacgtccagtgtctggacatgcttggatatttttccctctggacagttcctgaccttctagatacatttcaacatgacctctgtctcaggttggggctcgccaaccgtgcatgtgaaggcatgtgctgtctctcggccgcccaaggcatggtctttgcattctgtccgtagcctgaacaatcattaaccatgcaattgccctcttttctgctcatcatgggccccaaacccctccgtaaccactggaagccatcgctctctgctctccacaaggcaaaagggtgaaatattttaataatcatacagtgtgaaacatctcaccgaaaaaaacacagcaacaaccaacacatgtaaaagacaagactgatgaatctgactctatatgtacagaaaatatcagcagctggaaaaaatataccaccaaaaaaaaaaaaattgaacagagaaactggcaaaagcagatatcacagagttaaactttacaggttaatatataaagcgtataaagaggtcagaaagacacaagtggaagaccaaaagcgaagagtgggcagaggatgacaacaggctgctaataaaagggaacatttaaacgtttaggaaagatgaaaagatattccactttatttatagtctactaaacttggcatcgaaaatcaaaatgagatatcactttctaccactcagacagaacaaggtttataaaatagcacatggagtgggcaaggtgtggcatgtggaaacggggtcatccgctggctggcggtgaaggcgtggattggcacatttctgatgcgtattttagcaataaatctgcaaaagagccagtcaacagagtcccttccagcagaacaaatatagggaagctgccttcctactgggcacttcaggttagtaatcggagaaaagcaaacaagcacgaaagaaatagaagagcgatttggcattatctagaaaagctacaatcggtggctctccattgtgggatgatttcaccccctccactccgggaaatatttggaaatgtgtagagatgttttttactgtcacatctggggcgtgagtagggagtgaactactagcatccagtgggtagagaccagagaggctgctaaccatcctgcaatgcacagcacagccctcatcaacaataaagagttaccagcccaaaatgttaatcacatcaaagctgaggaggctgccgtattgcccagcaattctgttccaagatatatgtcccaggggagctccctccattcccacaaggaccaagcataatcgtgctcattgcagtactcactcactcagtgcagatctgttgaatgtgaactgtagcccagtcactttgccgtgatgggggctattcacagttttttgggtttttttttgagacagggtctcgctccgtcacccagggtggagtgcagcagtgcaagcctggctcactgcagcctccacctctgagatcaagtgatacccccacctcagcctcccaagtacctaggattacaggcgtgtgccaccatgcccagccaattttgtctatctttttagagatgagtgaggtcttgctgtgttgcccaggctggtctcaaactcctgggctcaagcattcctcctgttcttggcctcctgaagtgcagggattacaggtgtgagccactgcacctggtctattcatattctttgtagtgaaaaaaagtgggatgctgggagaggaacaactgaaatgtctattgaaaagagaatggataaataaattgtggtgtattcgtaaagtggactgcagtacagaagattaaagaatgagaggtacatgtgtccctgtggaaagagcgcaatggatgagagcaagttgcgctgatagaacatccaccctttagcctggcgtggtggggcttgcctgtgctcccagctactggggacactgaggtggaaggatcacttgagcccaggaggtggaggccacagtgagccatgattgtaccactgcactcctccctgggtgacagagtgacaccctatctcaaacaaacaaacaaattgacaagagaagaaggaagggagggagggagggaggaaggaaggaaggaaggaaggggagaaagaaagaaaagaaaagaggaaaggaaagaaaaggaaaggaaaaaggaagaaagacacccaccctgttaccaaccaccctcccagatctgtctgttgggttgcactgatcccttgcagggaatcgtcttcttactttgtgagtttacagctcagctccgtgtcattattcagagttactgtaacaatgcaattcacgagaagccctgaatgaatgccgttgtggctaccatcaaatgttgacacagcgttcaaccccatcgagaggagatgcattactcaagacatctgtagacagggatggaggactggaagaatgaatgaagtcattcattctttcaacaaacttgaagcacctgaggggttcttgcctggcactttgaaccccctcctttccacccccaaacacacaaacacacacacacacacacacacacacacacacacacactgatatcagagcccagaaaattccagtctccgcagctccttcttcagccctccccttcccgcctccagctgctgtgtccatggtgacagtctgagcaggcctgggttgccgccgaacaggtgattgctcttgaaggaaaacaacaccaagccactggggggatgggaggcagtggaaatggctcaaaccctggccccacagctgtggcctgtgcaggacccgcatgtccctgaaaatgcatccttgagagctttgcaaaagatcacgaaatcggccatgagggcctccctgaccctgtcagagataatacatctcttaagcatgagtgacattggcgttagctttttttctacttgttcatttattcatatattcaacaactatgaactgactgtcctgggagctggtgatacaagaataaaacaaacagacaaacaggaggcacactctgatctgatagagacatttgctccttcaaagaagatttttttcattcattctggatggacttacggaagagccgctgcatgctggggccatgctgggcacagaggatgcaccacaaagagagagagagagagagagagagaggaagagaggaagggaggaagatgggaaggggggaaggaaggaaggaaggaaagaaggaagaaaggaaggacggaaggaaggaaggaagggagtcaaacaaagtccctgctttctgttaaagaacaaagcattcgatgagacttgttaaagcatgggaaggaacaagatttaggaccatagtgatgggcatagacagactgcgacaaggggattttgcagtgggggagagaaacagggtgctcagctctgaatgcagcatgggcaagagagaatctgtagccaagaagcagggtgggggtcagtggatggaaaattactgagaggaacatctggggtttcctctggctgagaactgacctaacaggattcttgttgaagacaggctcagggtgagttgcccgggggaggctgaggatgagggacgtgaaagaacctgtcactccacagggattgtcgtctagttggggagagacatggtaaatcagtatatatttttgttttcttctgtatcctcactgcctagcagaatgcttgggatctagtaggatcttcacaatcatttttcagattgtgaacaaatgaacaaataaatgggttctgtggagttcacaattcaaattctggtgcctttattcatgtaccacgttcatagcatcctttctcctgagagtatccaaggttcctttcttgggtggatggggagttggctggatatggggcatcccggacaaagatgcaactgcctttgcaaaaactatatcagtgagaaaattctgacagtgaaagagatctgagctaacccacctcccatcttgcctttcccttagttattcctgggctattgggccaagctgactttggaagacatttgcgctacagtgtaaaagaataataggctttgcccaaaactcaactgcttttgtaaagctaatgggaggctggccagtgtggtggctcatgcctgtaatcccaacactttgggaggctgaggcaagagaattgcttgagcccaggagttggaggccagcttgggcaacatagtaagaccttgtctctacaaaaaatataaaaattagccagacatggtggtgcacccctgttgtcccagatactcaggaggctgaagtgggaggatcacttgaacccaggaagttgaggctgcagtgagctgagatcacgccactgcactccagtctgagcaatagagtgagacttgtcttaaataaataaataaataaataaataaaaataaaaagctaatgagaggtcagccggtctcactgtgttgcccaggctggtctctaactcctgggctcaaggaatcctcctgcctcggcttccaaactgccaaaattacaggcatgaaccactgctcgcagccccaggcagaaaattcttgaagcaatatctgaccattcatctctctttcttaaaaaactttaacgggcctggcgcggtggctcacggctgtaatcccagcactttgggaggccgaggcgggtggatcacctgaggtcaggagttcgagaccagcctggccaacatggtgaaaccccatctctactaaaaatacaaaaattagccgggcgtggtggcaggcgcctgtaatcccagctacacaggaggctgaggcaggagaatcacttgaacccgggaggcagaagttgcagtgagccaagatcgcactgctgcattccagcctgggcaacagagtgagactctgtctcaaaaaaaagaaaaaaaacctcaacatattccattgctctttagattaaaaacttaattcttaatcaagacctaccagaagttgcagctccagaattcccacatggaagggacttggagggaagttttgggtcagagtggaggccactgtggggtttgccgtgttcacaatgccattcatttgaatcaatgctgtctgccatgaaaagtgtacaagaaagtgaaggcatgaagaaatcaatgtccaactggcattgacttctttttatttcaaattagtataagaaataggccaagaagcacattaggaaacagaggatatgacggttaattttagatatccacttggccaggctgtggtgccatgcggtttgatcaggcaccagtctagatgccgtaggtgctgagtcgatgtaattagcatttacagtcagttgacttcaagtaaagactagtctccatcgccttgatgggccttatgcaatcagttggagatggactgttttttccaagaaaaaagaattctgcctcaagactttaacatagaaaccctgcctgaagttccagcttgctggcctgccctgcagatttcagacccagggagcaatatccactgttccctcagtccccagcctgctgccctacccatcgggcttgccaagcccggcaattgcaggagctaattctctaaaatagattcctcccctcccctcctttcccttcccctcccctcccctcccttcccctcccccctcctctttccccctcccctcccctctcctctcctctcctcccctctcctgtcctttcctcccctcccctcccctcttctcttctctccgcttctcccctgtcctgtcctcttctcctctcctctcctctcctttcctcccctcccctcccctctcctctccgcttctcccctgtcctgtcctcttctcctctcccctcctcttctcctctcctctcctcctcgctcctctctcgtgtctcctctccccacctctcctctcctctcccttcctctcccctcctgtcctctccccttccctcccctcccttcccctctcctctcctcccctctcctctcatctcctttcctctcctcctctgtcttcccctcctctcttcttctctcctcacctctcccctcccctctcttctcttctctctctcccatgcatgtctcctcttctctctatacttctccatcttcctctgtctctgtccctctccctccctaccttcctccgtatctctctgtgactctctctctctctctctcacacacacagacacacagacacacacacacacacacacacacacacacacacacacacactgttggttctgcttttctgaagaaccctagcacagaagggtattgtgcgcacaagctgacaacatagacacaccaacatctgctgcctgccaggccctcaggacaggagaccagaccagtctgtagatatcaagggagtgagacccaccccaaaatgtggagaaaactggttaacaacctgatacatggacgtggatgacagcagaatggctggtagtcaatattcttaaactctttgtatgattcggaaacaaacctctctaaagctctgtctgtattgtgctgtttctgagaaaattgttccctccttgtaccctgggctcttgttgaacataccacggtggatctttgagctgaaactttgtttgggtcctgggccagatatgaacattttagccacttctccttcaccaccaggagcatccccgtggcaatatctgtcccatccaaaccctctttggccctcatccctcccttggcgttggtgctgtggtccccggatggtttagactctatcagaggaggagaaggaggcacatccttaggacagggagacagctcgtggcctcgacttccctcccacaccaggacactcaggagaatagtttcataatttgggtgcagaaagtcttagtgagcacaattcttaaaagcttacaatcattaaagataagaagaattaaactgactccataagagctgaaaaaggcctggcacggtggctcacacctgcaatcccagcactttgggaggccgaggcaggtggatcacctgagatcaggagttcgagaccagcctgagcaatatggtgaaatcctgtctctatcaaaaatacaaaaattagctgggtgtggttgtgggcgactgtagtcccagctactcaggaggctgagacaggagaatcgcttgaacccgggaggcagaggctgcagtgagccgagatcatgccactacactccagcttgggcgacagagcaagactctgtcaaaaaaaaaaaaaaagctgaaaaagtaggcacagaataacaaaaatgtaaaccagaagaaatgataaaaatgggtgaaactattttcaacctaatgagattcaaagaaactatatagtttacatgtgaattgtgtttacaagaaaagaatttaaaatacggggtaacataaactttaaaatccatcaaaagagcaacaggtaggaacagaaaagccttaaaagataaaataaaatgtgccaaataaggaaaatgatgtttcgacctttcttgtactccaaaaaaatgaatatgcaaaccatactgggaagtcattctttctcttgtcagatggacaataaggaaatagacaagcagagttgactatggggtgagagcggacgccttctcaggctgctggggagagcgagttgctgtgacctttctggcaagatcttttggcagtagacttcaaagtttaatatctgcatgccctttgacccagcaaatccacttctgggaacccacctccccacagacatacacaaaagcacaccccacacacacacatggtcatggcagccttgccagagcacgatcagccgaaaagtccatagaacgtgcatctgggttgtgtgaagctcaacactgatgcagaattttacagtccaaagacatcagccccttgttagacaaatgagctgtgttttgaaggtcatctaatgttaagatgtatattacataagcaaaagttggattaaaaaacaaaaatgcatcattatccaagtttgagcaactgtaatacatttatgcatccatttatttattcagcttctaaaaaccattgatgctgggcatggtggctcatgcctgtaatcccagtactttgggagggtgaggtgggcaaatctcaaacctgggagtttcagaccagcctgggcaacatggcgaaaccccgtctctacagaaaaaaaaaaaaattagctgggtgtggtggcgcctgtggtcccaggtacttggggaggctgtggtgggaggatcacctgagccagggaaggttaaggctgcagttggaggttgaggatcacctgagcctgcgaggttgaggctgcagtgagccatggggatgccactgcactccagcctgggcgacagagtgagacccagtctcgattaaacacacacacacaaaaacaaacaaacagaaaaaccattgaacactcacgctagatattctatcagggagagaggatgtggcagagctaaaagaaaacagagtgtgcctgctttcacacaacgtccatttcactgggtgaaaatcacagaagaatataagtacaagaccattttggagagcaatctgccggtgtctaagaacgctgatcctatgtgttcccctatcgcccagaaattccagtttgagatttgtgccctagagaaactctcacacatagggcaaggaggcaagttcaaagatgttcattgtgactttcattgatttggcagatattgattgagcagaaactgtggactgggcactgctctgggctctggggagatgtagcgttgcttgtgatggccaggaaagcaggaggagaggttacatcccaagtgcctgccaatgcgagaatgggtgaataaactgagtggaacgtgaagagcggggagagattgggatcaagttgcagaaggatcagtccacagaacagtcctgcgcagaccctctctcagagacctggttaatgtgctttgtggacctctcaactctgaaattatttctgtcctctccttttttcccagtttttaaaattgtggtaaaatacacataagcaggccgggtgcagtgactcatacctgcaatcccagcattttgggaaggagaggcaggaggatcatttgggcccaggagtttaagaccagcctgggcaacacagtgagaccatatctctaaaaaaaaaaaatttttttttaaattagccaggcagggtggcgcgtgcctgtagtcccagctactcagaaggctgaggcgggaggatcgattaagcccaggagtttgaggctgcagtgagctgtgatcacaccacacactccagcttgggcaacacagcaagaccttgtctcaaaaaaaaaaaaaagccataatataaaatttgccattttaactatttttgagtgtacaactcagtggtattaaatacatttataatcttgtgcaaccatcaccaacatacatccccagagcttgtttcatttgtaaaactgaagctctgtccctgttaaacataactccaccgtcccccttccccagcccctggcaaccactgttccgctttctgtctctctgttatttgcctactccaggtaccttatagaagtgaaatcctacaagatttgcctttttttttttttttttttttttgtggcagagactctctctgtctcccaggccagaatgcaatggcgcaatcttggctcactgcaacctccacctcccaggttcaagcgattctcccacctcaaccacccgagtggctggaattacaggcatgcgccaccatgcctggctaatttttgtatttttagtagagatggggtttcccatgttggccaggctggtctcaaactcctgacctcaggtgatctgcccaccttggccgcctcccaacgtgccgctaatagaggcgtgagctaccgcacccggccggattttcccttgcgtgactggcttatttcacttagcctaatgtcctcaagcgtcatccacgttgcagcacgtgtcagaacttctttcctttctaaggctgaataatagcccatgttccgtttgcccatcgttcgttggtggacaccggggctgtttccacgttttagcaatcgtgaatattgctgctgcgggtgggggcagagctgtctctctgagactctggtttcaactctttggggtacgtggtgactccagttttaattttttccagctttcccttctctttgtgccttcagctggagtcattctggatccaactaagataactcatctgagcaggtggactgactgtgtggctcccacggacacagccacaaggagaaagttctcttggctcagatagaggtggggagggggtgcagggctgttcgttttctcagaaaacttgtaggaagcacctgcgttgcactaggcgggcattttgatctcagcacacttccagctccagacctggacatttgcagcctcctgggccttcactctggttcctcagcccctcccctcctctttggctatggtttccacggcaacagccttggcccgggcctgcctggggcctgcatatcagaggacagtgcttgagggaaaacatataacaaccgcccccgctcttccaaagaccgagaccggctggggaggcgtggacttgcggggcagggggctcacgctgcagctccgcctcccccatcgctgggtcagtctgaccccgttagctctttcctgtgaatcctgagaggcggtccctgagaagcgaaagcctcctgcaagagccggtgatgtcagtctcagcttttccacaccccttggttcattccacacatccattgagcaccactgagtacctgacgctggtcctgaagacaggggcgcaatgctgggtgttctcagcctgagactttcacatcccagacatttgtctgccagacacatgcattgaatcactcgaccaatacggactgagggctcagcagggcaagggtgggtgccacaggaaccagccctaggcagagatccctgcctccttggggtttccattctagtggggagtacacatggtgagcacagaacacataaagtcacagcacgatgagcgtggccaagaaacatcaatcgggggagagacggagtgacctgggcaggctgttttaggtaggcgtccgggagggcctcgagaccatgacgagaagtgagggaagggagcagagggacgagcattccaggagaggaaccagcaaggccaagagcttggaggtgggagtttgtggggacatgcctgtgtgagggaagccagtggcccctggcagcaagggctcacaggaggtgagggctgagtcagtaaggggcaaagggcatcctcctcctactcctccctgcttttcctcctttccctgcctttcctcctcctccccttcttcctccccctcctcttcctcctctttctcttcctccccttcccctcctcctcattttcctactccacatcctaatcttcctccccttccctctcttccccctgccccctctttctcctccttctcctccccttcatcctcctactcttccgccccctcctcctcattttccttctcctcctcctaatcttcctcccccttctgccccccttcctcctactgatcttcctcttcttcctcttcctctccttcctccttctcctccctcctcatcctcctctttgtcctctcctttttctaaaaagccttttaacttgcctggccaacacagtgaaaacctgtctttactgaaactacaaaaatgcaaaaattagccaggtgttggggggaatgcctgtgatcccagctactcgggaggctaaggcaggagaatcgcttgaacccaggaggcagaggttgcagtgagccaagatcactccactgcactccagcctgggtgacagagagagactctgcctcaaaacaataaataaataaatcttttaaaatgtgaaaagcattcttagcactctaactgccatggttttcacactcctgaactacagtatgattccgatagcacgtagtacattttatgtatgcatatatgtgtatttacaaggccaagaaaataaatagcaaaataaaaatatgattacttccagactgtctgaatatgaagtaaaaactggtattttaaattaaaagcgttaacaccttttattctcttggatccaataattctacatccaatctttttatctttttcatttctctctgaggatttcatatgatgtggtcaagttagtgtataaggctgttgttctacctttctgtggaacagtgaaatactgacaaccttattctctcttcccagaagaacaccatggcttaatcaaaaacttcttggctgggcacagtggctcatgcctgtaatcccagcactttgggaagccgaggtggggagatcacaagatcaggagttcaagaccagcctgaccaacatagtgaaatcccgtatctaccaaaaatacaaaaaattagctaggcatagtggtgggctcctgtaatcccagctacttgggaggctgaggcaggaggatcgcctggacccaggaggtggagcttgcagtgagcggagatcatgccattgtgcactccagcccaggcgacagtgcgagactctgtctcaaaaaaaaaaaaaaaattctttcataggaggaacttccagaaaaccaacacctagtgtatatttaaatattcctcccggctgggcacggaggctcacgcctgtaatgccaacactttgggaggccaaggagagtggatcacctgaggtcaggagttcgagaccagcctggccaacatggtgaaaccccgtctctactacattcaaaaaattaggtgcagtggcgggcgcctgtcatcccagctactcaggaggctgaggcaggagaatggcttgaacccgggaggcagaggttgcagtgagctgagatctcgagccaccgcactccagactgggcaacaagagtgaaactctgcctcaaaagaaaaaaattatatagatatattcctcttctcaaggaaagaagcccccaccacccagtcccagttccctgagacagaaactggggaatccctgactccctgtcacaccctggacatccagccgccggggctgccaggtacttctccgggtggctcctgagtcagctgagactcaggagtgtggttctccctctgcccaccccttgtgctcttcccccgggacccatttcccgccacctgcacccactatgcttgactttcatcagttgtccacacagaacacggactggaatttcttacaggaaaatctgaaccatggccctcccttgcctaaaacacctcaaagaatacactttgcattttatataaatactcgaattcttctcaagattcacaagctgttggagctctagaatttctacatgggagggagtaagagtagcaattgagccacaatagggatgcttggaggcttgccttgaagctgtgttcacaaaatgttgtcaccagttgtgggagggaggaaggaaggaaggaaggaaagaaggaaggaaaggagggggaaggagggaaaacggcttcttttacagtatgtttctgtgggtacacacacagaaagcaaggttatgaaatcataaaggttattcttacatgttatatctcacttattatacatatgttatatatctcatttattttaatcctcattcatttttactttaattcaacactatacagaattttggaaatgggtttgcaaggcccccataaagtcacttagtacaggaactaaaaccaatagaaattagagccaaggtttttaaccccaggaaaggagagagaaactcatttacaactggagccagggacataatctaggaaacagacacctagtattaaatatgtttatgaacatattgaaaatgaacaggcccagaatcctggccacattttactctttccgagaaagccattcccttcctgagtgagaaggcgagagagggagattcagagagattttgggcttcaccctggcattcgggacattaatcagggaaaattccaagtaggttgatttatctggcacttggctgaatgttgacattcttacagcctcgtccaaaaagccgtgagattccgggagaaacttccctctcatgggagccctcctttcagtttaagtctggcccagattcctctgtgagcaactggagccaggaccctgctgaacagagtttctctgtgggcacaaagtgcactcaccattgccttttctcagcttggtgtgagagggtgtaagtgttcttatcatcacagacaggcaagacattccgtttttaaaaggtaaaaagcattcttagccctctaactgccatggttttcacactcctgaactacagtataattccaatagcacgtacattttatgtatgcatatatgcatatttataaggccaagaaaataaatagcaaaataaaaatgtgatgacttccagactgaatatgaagtaaaaactggtattttaaattaaaagccttaacaaattttattctcttggatccaataattctacatccaatcaagtatgaaagaaaaggtacatgcttcttaccacatagagacaatgagataccacctcggacccatcggcagggctactgtcaaaacaaaccaaccaaccaacaaacaaacaaacccagaaaatagcaagtgttggagaggatgtggagaacctggaaccctgtgcctggcaggtgggactgcgcttctgatagggtattcataaagcagaaaaatgccagagcttgggcaacatccacaaagctctcacctcacttgtaatccaaaaactggatgccagaccaggtgtggtggctcatacctataatcccagcaatttgggaggctgaggcaggaggatttcttgagcagaggagttcgagaccagcctggacaacatagtgaagccccatctctacaaaaaatacaaaaattagccgggcatgatggtgctcatctgtggtcccagctacttaggaggctgaggtggaaggatcagcctaggagtttgaggctgcagtgagccaagattgtaccactgcactccagcctgggcaacagagtgagaccctatctcaaaaaaaaaaaagaaagaaaaaaagaaaagaggatacccaaaccgaattgaaccacagtttccactgtatcctatgggtgaagatgaaaatgcagttggcaggggctggggcaggcacgtgtgtgacatactgcgtctgttcagcattttggggaatgagttcagactttaaaatatgttcactctttgacccagcggttctgcccctgagtgcacaggacccctagtccccaccttgtggtcattacagtgatgtttatgaggcgactcattaaaagaagggatgtcgtggctggcagtcaacagaagaaagcaattttgtataaaacaacgtgtgtttcttcagcatcctgaacgccatgggtcggggtccccaggggcacctccaagtttcatgactcactggaaggactcacagcaaaagaatgaaaagcaaagtcagcgagggggaatggcaccgagagccctcttcgcgggagtcacacaggaggcaccgattcctccagcaaggagttgcaacaacacctgtgaaatgtcatctgctgcggaactcattagagactcgatgtccggggcacttacttggggctggtcacacaggcacctgctgcctggcatctaccagaattccagacgcccagtaggaaggcggctatttagcataaaccatgctatttgcataaacagtgtggacacagtgagacaccagcccaagggccaacctgctacataaaatctttcattgcccgtcgtaatagcaagataaaccaggataaagacttatgtatagacttaaatcccaacgctgagtaaaaatattccatttactcatttttttcttcacaatctagtgatgcttgatgatggtcacatgaaaaagagcaaacatagtggatgcccctgccttcctgaaacctccctgatttatttatttatttatttatttatttagagacggagtcacgctctgtcaccaggctggagtgcagtgctgcgatctcagctcactgcaacctccgtctccccggttcaagcgattctcctgcctcagcctcccgagtagctgggattccaggcgcatgcgccgccacgtccagctaatttttgtatttttagtagagacagggtttcaccatgttggccaggatggtcttgatctgttgacctcgtgatccacccgcctcagcctcccaaagtgctgggattacaggcatgagccagcacgcccggcctgaaacctcccttttaaaccacaatttgggaaagcaatttggtcccatctagaaaactgtttatggtttgaaaatgcacgtacccagaatcctggccacattttactctttctgagaaagccattcccttcgtgagtgagaaggcgagagagagatttagagagactttgggcttcactctagcatgtgggtcattaatcagggaaattccgagtaggttataaatctgtgcttttcctctcccccagcagctccattcctagaagtttcaccagagcaaagtctcccacgtttgggcgaaggagagaagtacatgtagcaagcaccagctctgtgctgtttcagggttgtttgtaacagcagaaaatcctggggccatcgacaggagaagagatgagtggatcctgctgtgttcccctagtcggatactctgtagccatttaagtggatgactgagtgccatgtgcacccgcacggatacgcgtcaaggcagtgatgatgtttgaggatgacacgtctcaataccgcgcagctagtctcaccacccagtcactctctgtctcagtcgactcaggctgggtctcagtctgtttgtgctaacaaaataccacaaactgggtaatttatgaagaacagggatttatttctcacagttctagaggctggaagtcccagatcgaggtgccagtggctcagtccctggtgggggctctcctcctggcttgcggacggcctccttctccctgtgtcctcacatggtgggagagacttagtgtctggagaactcactttcccttctcatagagacatgaaacctgtcatgggccctaccctggtggcctcatttaaatctaatcattggccaggcacggtggctcatgcctataatcccagcactttgggaggccgaggcgggtggatctcctgatgtcagcagttcaagagtggcctggttaacgtggggaaaccctgtctctactaaaaatacaaaaattagccaggcatgacgatgggcgcctgtaatcccagctactcaggaggataaggcaggagtatcacttgaacccaggaggcagaggttgcagtgagccgagatcgcgccattgcactccagcctgggtgacagagcaagactctataaaaaaaaaaagaagaagaagaagaaggaggaggaggaggaggaggaggaggaaggggaggaggaggaggaggaaaatctaatcgccttccaaaggccctgcttccaagcaccatcacactggggctttgggcttcaacgtatgattttggggggtaaacaaatgcaatccatagcactgtctatgttcctcattgtatgaagaactgaaattgtttcctgacagctttgcaattcctgacagttttgagctttatccaccaaaatctacctggcaaggagagctaggtgcatgccattctccctagaatcgaacactgatcagttctggttttgccttgcaaggaagaaacattccttacagcacagagagtgcaggtggggatgggaaacatgttttgttcttttcctgagctcatgttgtgttccttgtatgctgggacattttcaaacccacgcatgctcacctctggagcctggacattgcccagccctgagcctctctcagcagccccttcctggctcccacacaagctgcagtttccatggcaacaggcagagctggcctttgtccttggagcctcccggtgagaggtctttagggaaaacaggctggagcaatggacaacaaaattaaacagcatggggccccgaggcgtgttctttcctataattaaactgcacccttggacatttgtagaatgccataaattggctgtaccctgctcagcattccaagtcccctgcaagcatcataatcaaccattatctgctttcatcatttgtttcttcatttgtctatgcattaaccattgattttaccccaacagtagtagcagacacgcttctagaaaatggagatcttgcagaggtttctaaccagggaccattttgcttacaaagaggcattcggaaatactttcagtcggcacagctggaaggggtgggttctattagccttgagtgggtagaggccagaggtgctgctaaacatcccatagtgtacagaacagccaacccctgccgaccccgacacacaaggaggaatgttctggccccacaagtcaggagtgccctggccgagaaaccctgggatacagtgatttgcaagaacccacaatgaaaacccttgaggcacgtacgctctagggaaggagacagctcatgaaatataatgcatgtgccataatgaagaatcagagatagtaggagagagagcaacgggggcgaaggagatggagcagccagggctgtcttctcccaggctgtgataagtgaagagagacgagtaaggggaggaagcagtcctggggaaagaacactggggagtgggcacagcaggtgccaaggccctggggcagaaacacacggagtgcattctgggaaggatgaggagaccaagatggctgaagtcctgttagggagagtcaaggagagaaggaagggatgttggatcaagaaggtccttgtaggtggtaaggacttgggatttataatttagctgttaaaattaggaattatgagcatcatcaatattaactgagcatttactccatgccgggctttctgtagagcactgagattcctagggcctggaagccggcttagctaatgggagagagtggaggaggtcaaacagacagtcacgtagagataaacttcaaagagaacaaatactttgtccagggacactctgggctgtgtggccactagggcaggggtggacatgagaggaggctgcgattagggcactagccagggagagaggcagcatggatgtgttttggatggtggaactgttaactgagacaaaggatttttgtatttttagaatcagcagtttcaaatttaggatggggccagggttgccaatagatacaccatcaacattatcattacaatcattacttatttttattttattttatttatttatttattagaggcagggtctttctctgtcacccaggctggagtgcagggctgtgatcatagctcactgcagcctcaaactcatgggctcaagccatcctcccacctcatcacgactatgataatgaagtaattaatatgtattatacttgttctgcacgtagctttctactggatgcccgtggcacggcatatctgcagggcaggcgtgatcaccttcccacattcctgatgaggcctctgaggcacagagaggaaaggggtggcctcctctcattctgtctgactgtggaatcagactagcctggacagaatccatcacaccacggccacctaatcctctgagccacagcttcctcatttgtaaaaaaaaaaaaagaagaagacctcgctcccagggtcggcatgagaattaaatgaacaagggaataatggccacacagcaagctcaataaacaacagcacaaaacactcagtcatcaagataaacaatattttcatgcagtatttgaaaaaaaaattcatgtacaaaaaaacgtgataaacaaaatattaaaaatttaaataaagacaggaccctatgagactgtgctgagctacatcagaccctcaggcaaaaggaaaagtgcgtatgaccctaagcatgttgctactgtttttttttttttctttgagacgaagtctctgttgccaggctagagtgcggtggcacaatctcagctcactgcaacctgcaactccctggttcaagcgattctcctgcctcagcctcccggttatgtattttttaatggttattttccagaaatagattttgaaaatattattgatgagtctgcttccactgaggccgggaaaataaaattataataaattctatttttaacacataaaattaacataagacattgcgagtttaatatagctatttttccttttttcaacatttttaaaactaatattctgtgggggtggggagtgaaccattaaataattacaagctgcgtgagagagctcacacctgtaataccagcatgttggaaggctgaggcgggtggattacttgagaccaggagttcaagaccagactaggcaagatagaaagactctatctctacagaaaatttttaaaaagtcagaaatggtgttgcatatctctagtcccagctactttggaagctgaaatgggaggcttgcttgaggccaggaggtcgaggctgaagcaatcttcaagaacaaatatttgctcagggacttctctgggctgtgtggccactaggtcaagagtgggctgtggacatgataggaggctacgattagggtaatagccaaggacagaggcaggaatggatgaattttggatggtaatactattcaccgagtcaccactgcactccagcttgggcaacagagcgaaacccagtctctaccaaaaaaaaaaaaaaaaaaaattgcacaatcacacggatatagggaatcacacttttttttttggcctcgggcttcagtacagctcagcacacattgggtttgatttaaattttgagtatttgttcatccattatggggggttgctttctgcgttcattttggttttcaaaaccattgtgttaaatattatttatcttaaataaaattaaccatactcaccatgtggtataatccccggaacgtattcctccttcatgactgaaattttgtgtctttggaccaacatctcccgtccctgaacccctcagctttctggatgactgtgcacctccgtaagcctcttcctaatccccaggtctgcctttgaggatatgacctttgagctgaaacgtgaaaattgggaaagaaacagccatggggactgtggggaaaggaaattccaattagaggaaaggcaagagtgaaggtcttggggcaggaagctttttcagggacagtgaggacagcatggccagggggtggtgggtaaggaaagcagcagacaagagccaggttgccaccgaccttgtgggccaaccacgggtagctttccttttaatccaagtgttctagagccaccgatctaggctcagttggcatggaaggtgggtgagagaatgacattatctgactcatttgcagaaggtctgcagcttgatttttttggaggatagacttatcatggggacaggagtgaccctcatcatcaagatgtgatagttatctagggagaggtgttggtacctggacgaaggtgaacagaagtggattgaatctcattacgtcatgagagtgagaagcacagaggatgacagaggatgatgtctacgtttcgagtttgggctcttgcagactgggtagtgccttttatagagactggggagacttgggggtgaggagtagaattttgagggggactgacaattttgatgtgaacgcgttggctgaagatgccaatttgacatccatgaagaggacctgtcccgaagcctcacattgctaaaccccagaaaatatcagttttgccagcccaatagataacatcaggggattctattttttgcatgttttctcctcaagagtccaaggataacccactgagtccgctcctgatctgaacctctaaggtattgccaggcctggtgtcctaaacatcagcccatgaggaaatcagccctgggccctgtaccaccaacacaacatcatgtcctgtatccccaaaacatgcaaaagtctcatgaacatgcacatcctctgtgcttccctcccctgaaccaccctcatcctcctttctaggtccttactgccacgcacgcgtgcagtctcatgaaaaaggggaatactgtgaccgcccctgtttccaaacggatattgggcctcttttcaagcgtacgttttcagtttacactttcagagtttgttgatttgtgagttcaaggccctctctgccctgcggagagcacggaaattcctggaactgggggcgtgtgtgaaggggacgttgtcaacgctaggacagagaagaaagccgctcattttgatgtgtcagagcggtggggggtggggcttccagcccctggcatctcagccctatccttccttcctgcactgtgcttctcacaaacagcaggggcttgtgttactttgagtcgatagcctcattcacgacactctcacagaatagtgcccgtctgtgctcagcacatgcccgtaaaacaggattccccaaacacgtccataggtaactgtaaatcatttagaagaatctaaagtgtgaattttgtaaactgaagctacgtgcatgtatacacgtgtgtgtttgtgtatatcatatatacacattaatgttattattattatttgcaatacccagcatcgcataataggtgggataatgcagatgccactccaagccaaatctcctggccccaccggtcataagcttacctctgtagggaagaaaaggtttctttttggcagtggtttgttgtttgtttgtttgttttgagacagggtcttattctgcggcactggttggaatgcagtggtgcggtcactgaagcctcgacctcctgggctcaagtgatcctcccacctcagcctcccaagtagctggggctacagatacgcaccacaacgcccagttaatttttgtattttttgtacagatggggttttgccatattgcctaggctgatctgtaactcctgagctcaagcgatctgcctacctcagcctcccaaagtgctgggattgcaggcatgggccagtgtgcctggcctctttttcctcaccaattgctaggttcatgactgaggcccctgtaacacaagacagatcaaccaaaaaaaaaaatcatacagatttatttagtataagttttatgtgacacgggagccttccacaaggaaataaagacccaaagaaacagaaaaacgtgtatatttgatgctggtctgatgaagaagtggatggctgtggagaagtatttgacagaggcagtgtgctctcatgctacaagagtgagagagtgaggggagcttttcaaggcctgtttgttcagattcagtgtcttcagagataaggatgctcctctcctacgggtacagagagggcacgctggaatgacagtcttacaattgcttcagagagaaggacgaggaaagctgagacaggcatttctgctcatgctgttttctcaaatgccaacgtgccatatttcagggtaccatgtcccgagccccaccatctcctaggtaggaattcaggattttggtgtttgtcctactagtaatgggaacccaacaggaagggaattccaagtgtgagaattccagccaaagcccagggtattccagggacccctcagtaagctgttgcaacactcggagccaggagatgctggtggccggtagggggtggtggccaggaccttagatggatgggccaccctcaggggaggttctgtggtacagggtggtggccaggacctcagatggatgggccaccctcgggggaggttctgtggtacggggtggtggccaggacctcagatggatgggtcaccctcaggggaggttctgtggtacggggtggtggccaggacctcagatggatgggccaccctcgggggaggttctgtggtacggggtggtgcccaggacctccgatggatgggccaccctcaggggaggttctgtggtacagggtggtggccaggacctcacatggatgggccaccctcaggggcggttctgtaggccacctcgcgggactccatgacagacgttaagcatggagcctggagaggaggaccccaggtggaggccctggtcccgcctttacgaatgggtagaaagggcttccgtctactgagacaggggtcttgctcaatctcactcacatggatgctccaggaagaaggagcccactcttcccacaaagaaaagaaagatggctgggggtgatggctcacgcctgtaatcccagcacttagggaggccgaggcgggaggatcacctgaggtcaggagtttgagaccagtctgggcaacatggtgaaaccccatctctactaaaaatacaaaaattagccaggcatggtggcgggggcctgtaattctcctgtctcagcctctcaagtagctgggattacacgtgcccaccaccacagcctggctaatttttgtctttttagtagagacagggtttcaccaggttggccaggctgctctcaaactcctgacctcaggtgattcacccgactcggcctccaaaagtgctgggattacgggtgtgagccaccgtgcctggcctaaaatacattttatagcctataagagtgtctcatttcaagcacagaccacaggcctggtatacagtaggtgcttactacagccttgtcgatctgaattctatcagctcttctcaacagttctataaatcaagaacaatgggtgttcaggactctaaacttccatacaaattctctggacatccccttccagcaaggtgctgttcccacccctccagaaaaacattctgtagctcctactgattatgggccatgagaaggagtgggagttttattctgagaaaatagtaagaactgattgcagagttaggcacgggaggcggatgctccgattttcctttgaaaaggatcagggcctttcgaaaagcaattgcggactttcaagggcagacgatctctggtcacggggttgtttgtgcagcggggccttcaggacgagatggatgggacgtgtgggctgcggggcaaggccgagccaggctgacgtcgcggaaagcagagaactgatgaatggaggctggctgtcttccttgagaccgggatcgtattttcaagtgtttgggtggcagaggcgttttagagggagagagagccaagaataaccagtccatgggcagagaaaaaggcaattcctgaaagggagggataacaagctcacacacacagagctgggagtggtgcccagacgcctctcccattcctggacccttagttgtcttttatttatttatctatttatttatttttttgagacagggtcttgctctgttgctcaggctggagtacagtggtgcagtcacagctcactgtagcctctgccgcccaggctcaagcgatcctcccacctcagcctactgagtagctgggaccacggacacatgctgccacacccagttaacttttttgcattttgtcggtagacacatggtctcaccatgttacccagactggtctcaaactcctggactcaaaaatgatcctcctgcctcggcctcacaaagagctggggtacaagtgtgagccacccaccagccctcagttgtcccatccatctcatcctgaaggccccgctgcacaaacaaccctgtgaccagagaacgtctgtccttgaaattccgcagttgcttttcgaaaggccctgatccttttcaaaggaaaatcggagcatccgcctcccgtgcctaactctgcaatcagttcttactattttctcagaataaaactcccactccttctcatggcccataatcagtaggagctacagaatgcttttctggaggggcttggaacagcagccttgctggaaagggacgtccggagaatttgcattagcgcttagagtcctgaacacccgttgttcttgctgtatagaaacgttgagaagagctgatagaattcagatcgacaaggctgtagtaagcacctactgtataccaggtgggaatgtaaaatgatgcaattactgtggaaaacactttgcagttcctaaaaaattaagtggagaatttccatatgacccagcaaccctgcctctgcatagagaccccaaacagttggaagcaaggactcgactcagactgatatgtgtacacccatatccacaacagcatcatttacaagagccaaaaggtgggagcagcccaaatgtccatccatggatgaagagaaacaaaatgtggtttgtacacagcagaatgtacaagctgagcatccctcatcggaaaatctaaaatccgtaatgctccaaagtctgaaaactttttgagtgcagacatgcagctcaacggtcgtgctcaaaggaaatgctcattgaagcattttggattttggattttcagattagggatgctccaccagtaagtataaatgtaaataatctggccagaggccgtggctcacgcctgtaatcccagcactttgggaggccgaggtgggtggatcacttgaggtcaggggttcgagaccagcctggccaacatggagaaaccctgtctctactaaaaatacaaaaattagctgggaatggtggcgcatgcctgtaatcccagctactcaggaggctgaggcaggagaatcacttgaaccagggaggtggtggttgcagtgagccgagatcgcaccactgcactccagcctgggcgacagactgaggccgactccatcccaaaataaataaataaatgtaaataatctgaaacctgaaaaaatctgaaatccaaaacactcctggccctgagcattttaggtaagggatactcaacctgtagttcagctgtaaaaaggaaggaaattctgacacatgctacagcatgggggaaccttgaggacatcatgctaacttaaattacgcagtcacaaaaatacaaagactgtatgatcctagttatatgaggtccctagaggaggcaacttcacagagacagaaagaaggtggcatggtggcagccaggggcttgggggagatgggatggagagttcatgtttgatggatgcagagtttcagttgggaaaacgaaggcgttctggagatggattcactcacccatgtgaatgtatttaaccccacagaactctacactttgaattggttcattttatgttacctatattttaccataatgaaaaaattaaaaataaagatgtacatgaaccactggtgaggtctctgcggggttaatcgtcttcatctccgcttccttgcaggtctgacatcagtagcgcttccatttccactcagcaacatttacctggtttttcatcataaagggcttaggctgttgccatggaaactgcagcaagactgggaaaggggagggggctgcgagggagcaaagagagagcttggagactggaattttccaggctctgagctcacgctgtatgcttcctttgtgataagtcactgagtgaaaatgtgggtctttgtccacaatagcatggtcgctcttcattcctcagtgagactctctcatggaggtgatgaacacacagcagtcagcccagtgccaaatctcctaagagccaggtttctctgtgggtcccctctggattgacacttgcgtatggaccttgggaaagagattctcatttcctcttcttattattttttaacttttattttaggttcaggggtacgtgtgctggtttgttacggaagtatattgtgtgtcgtgggggtttggtgtacagattatttcatcaccaaggtaaagagcatcatacccaacaggtagctttttgatccactccctcctcccatcttccaccgtcaaataggccctggtgtcttttgttcccttctctgtgtccatttgcactcattgtttagccctcacgtataagtgagaacatgtggtatttggttttctgttcctgtgttagttcaataaggataatgacctccagttctatccatgttactgcaaaggacacaatctctttttcatggctgtgtagtattccatagtgtatctatgctacattttctttctccagtccactgttgatgggcatctagattgagtccatgtctttgctattgttgatagtactgtgatgaacatacacgtgcatgtgtctttatgatggaatgatttatattcctttgggtatataccccataatgggattgctgagccaaatggtacttctgttttaagttatttgagaaatctccaaactgttttccacagtggctgaactaatttacattcccaccagcagtgtgtaagtgctcctttttccccccagcctcaccagcatctgttattttttgacttttcaataatagtcattctgactagagtgagaaggtgtgtcattgcggctttgatttgcatctcacaacccctttcagaagtgcttaaagtatatgaacagatattttttcaaaagaagacatgcagatctgggcatggtggctcaggcctgtaatcccagcactctgggaggctaaggcaggctgaggtcaggagttcgagaccagcctggccaacatggtgaaaccccatctctactaaaaatacaaaattagccgggcgtggtggcggacgcctgtaatcctggatactcaggaggctgaggcaggagaatcacttgaacctgggatagggaggttgcagtgaaccgagatcttgccattgcactcaagcctgagcaaaaagagtgaaacttcgtcaaaaaaaaatatatatatatagaagaagaagacacacatatgaccaacaagcacatgaaaaagacatcgttatttaaggcagactctctccaattatttaagtttgaaagtctttacaaaaggagcaaaaccatttctactctcctccttagcatgttgacttctaaaaacaggctttgtgccactgaaacgtgagtcaagtacagttttgggctaattgtttactagctggtttatataacagtaactctaactgtggaccagcaaccacaataacaaaaagcacttgctgggcttaatgactcacacctataatcccagttctttgggaggctgaggcaggcagatcgctggagctccagagtttgagaccagcctgggcaccatggtgaaaccctgtctctacaaaaaaattaaccaggcatggtggcatgcacctgcagtcccagctacttgggaggctgaggtgggaggatggcttgaacccgggagacagaggttgcagtgagctgagattgtgccattgtgctccagtgcaggcaacagagtgagagcgtgtttcaaaaaaacaaaaaggaattatttattcagccagtcacttcatgtatgagttatctattgctgtgtaacaaatcatctgaacttagtggtggaaactacacatattaactgagactctgtgtgtctcatgaggctggagtcaagacctcagctgggcagttcctttcaggggctcagagtcctcctccaagttcaccaggttgttggcagaattcagtcatttaaggctgtaggactgaggtcccacatttttgtcagtagttttttgctgtgtggcctcctcgcaacatggctgttcacttcatcatgtgctgatcattgccttttaaaaaatcatttgtagcttgcacagtggtgcacacctgcagtcccacatacttgggaggatgaggtgggaggagcgcttgagcccaggagctcaaggtttctgtgagctatgatcacacctatgaatagccactgcactgcagcctggccaacatagtgagacctccgtttcaaaatgattacttaaataattaaaaaatcatttgtgactccagctgatttagaaatatgccatctgattcttttcttattgcaataaaatatacataatatccacaattttgaccattttttagtgtacaattcagtggcattaggtacagtcacatcgctgtgcaaccatcaccgccatccatctctagaactgtttcatcttcccaaatggaaattctgtctctgttaaacgctcattcccctttccccctcccccaggtcttggcaaccagctttctactttctctctatgaattcagcaactccaggtacctcgtatcagcagaatcatacgatatttgattttttgtgtgtctggtttatgtcacttggcatagtgtcctcaaggttcctgactgacacaggagcctaatttctggccaatgtccttctccaggggaagatggccgctatcgggtctagagtagacaatggatgaagagaactagaatgacttaagattgatccagatggtgggagatgctcaaagcttttgtgagaacgagaaggaaagcacagggaggaggaatactgtaactgaagctggtgcattctgaaaacaagagtcacaatgtgagcataacaccagccccgccaagtgccctcctgattcatgagtaaaatgcccaacgaagcccaagagctatgaacggaaccatcaatcaaagagacttaatggttttcttggaagcagctcagcatagcgaatgatgttgagacacccatttccaatatattaaaaggtgtcaaatgttcacagtctttttggcagatagtgtctctggaacattctttaacaagctgtctgctaattttaagagcatctgatcttattctcatggtttgaggcatggtggccacggttgggaacggccatcactgtgcctggctcagcaaacaccacctcgggtggtgccgcagctggttctcgcatttcaagtctatgagatcctctctcaccacttgcgtgaaaatagctccctaccccaatcctccacattaatttgggacttaacttttctcaccctctgacagttttttttcctgtttctgtcactagaatgaagcctttcggagggcatgggctcaccggaatcctgtgtgtagcaggatgcctagcacagagtgggaatgctaaatacttgttaaaggagtgaattaatatttggaaggaatgaatgactcttctgattgcctaagtcctggaggagtagagatggtgcccgttttaacttcccttttatcctgcatgcttagaacagcatctgatgcacaactggtgtctgttgactgactcgatgagtgaatgagggaacaagtaatgtctagaccaccggagcctgcagtagagtagtgggtcccggagacgtccacaggacaagtggggccgcttccccgacctcgctcccattccgcaacgctcctttgtatttgaacataaatgaagtaggggcgagggcctgcaggctggagaacctcccctggtcctttcatcccctcctaacccaggctgggttaacgacagcggccccatcttggtccttcctcggggctcttgtttcttagcaacccaggcaaactccatctgttaccatggaaactgcagccgggatgaggaagtggaggtggctgaaaatcagtagacagaacctcagaggatggaatattctggaatcttgtatcagactgagtgtgcacttaaaatttttagcttagaaccgactcgtttctcatttatttttgtgaataaataaaactgtgtgttcttgggcaggtgtttccatctctccgaggcatgagccaccaagcccggcttttttttttttttttttttttttttttttgagatagggtcttgctctgtcacccaggttggagtgcagtggcatgatcagagcttgctgcagcctcagcctcctgggctcaagtgatccttatgcctcagcctcctgagtagctaggactatgggcacacgccaccactcctggctaatttttaaagtttttgttgagatggagtcttgctatgttgctcaggctggtctcaaactcctggcctcaagcaatcttcccgccttggcctccctaagtgctgggttcacaggtgtgagccaccgtgcccagcctacctgggattacaggcatgagccacgatgcccagccgactaattcagtttctgaggaccccaccctcatgatctaatcgtctccaaaggctccacttctaaacaccatcgcacttggggttaagactttgacacatgaattttgggggcacattcagaccatagcaaacccttagctcgggatccgtgcttgatacgtgttaatgattttgaacttcattaagatgaaaataagagaagacgcgatgaaggcagctgtcactggtctcggtgttcactgtcctgggatctgcccagccgaggggcttcattactcatcggagagaaaagtgagtgggggactcccactccttggggctcagttctttattctttcaataaatgcttcatacaggtctactgtgtcagaggtcatggttaagaaccaactccaaagactggaaaattccagtttccggggccctcccggccccttcctcagctccccccacctttccgccctccagctgcagtttccatggtgatagtctgagcctccctctgttgctaagggcagataaacggtcaggagagggagcaggtcacataggttgattaatctccctgagagatggtggtgggcatgggaggggaggggaaggaaagagggaaagagacccaaggggctcaagtctgcaaacccccatctatcattcatgcacagcctttgcgtgcctttgaataggggtttgcagaagaagagaaatgtgcctgtggagagaatattttaaatgtattctctgaaccaggcggggtgggtcacgcctgtaatcccagcactttgggaggacgaggcaggtgggtcacctgagatcaggagttcgagaacagcctggccaacatggtgaaaccccatctctactaaaaatacaaaaattagccgggggcggttgtgggcacctgtaatctcagctactagggaggctgaggcaggagaattgcttgaactgggaagcggaggttgcggtgagccaagatcgccccactgcactccagcctgggcaacagagtgagaccctgcctcaaaaaataaataagtaataaataaaatatataaaataaaataaataaaaaataaaatctattctgttagcaatttgaaaacacacaatacattgtgtgaggtgatagctgtgttaattagcttgagttcatcattccacaatgcacacgtatattaaaacatcacatcgtactccataaatatgtacaataagtatttacctattaaaaataattttttgaaaagatctcacatacatacaaacaaaaaaaaaacccatgcatgtgagggtctctgcagagtcagttagaaatcacgtatctcctgcatcttctggcaataacagcattatctatcatcagaattcaagttatctgataaacattgactgagactttctgcaggtcaagcccttgtccgtgggcagaaaataaatgtccggcaaatggggccgagcctgccttcctgcgctctgtttgtgtgggaggtggatccattcattccaaaagttagatcatttatttttaaaagatgttgattttcttctaggaggcaggtatcatgctagacattggggaaacagcaaggagtaagacaggccttgcaagggctgccttgcagcaaaggagacagaaaatgaactcacatatttcacgtattataccatcagaaagtccattaggcctatgaagaaaaatacagcagggaatccaaagatattaacacggcaggactgctttagatgcaggatgctaaggaagtggtgatggctgagcagaaagttgagtgagggagagagtcacattctcaggactctctggggtaggaagagggggacagatgggagtgcaaaggccccgaggcaggaagaggtaaagcaggtgcaaggaattccatggcaaggaattctttgcacaagaacttaaaacagaactaccattccacccagcaatcccattgttgggcatatatccaaaggaatacgaattgtcctaccataaagacacacgcgtgtatatgtccatcacagtattgttcacaatagcaaagacgtggagtcaacctaggggcccatcagtggtggactggataaagaaaatatggtacctgtgcaccatggaatactatgcagctataaaaaagaatgaaatcatggccttttgcagcaacgtggatggtgctggaggccattatcccaagcaaattaacaggaacagaaaatcaaacaccacatgttctcacttttaagtgggaactaaacattgggtactcatggacataaagattagaaaaatagacactgtagactactagagggaggagggagggggtaaggattgaaaaactatctattaggtactacgctcagtgcctgagtgacaggttcagtcataccccaactctcagcatcatgcaatatatgcatgtaatagacctgcacatacttgtttttctgatttcaccagtttttttcctcgaggtatcattctatgaaagtgtatctcattcatgtgactatcatcatatccgaatacagaactgttctatagccacatatacaaacaaaaaataaaaacaggccgggtgcggtggctcaaacccgtaaccccagcactttgggaggccgaggtgggtggatcacccgaggtcgggagatcgagaccagcctggccaacatagtgaaactttgtctctactaaaaatataaaaaattagccgggtggggtggcggcgggcgcctgtagtcccagctactcgggaggctgaggcaggagaatggcgtgaacccaggaggtggagcttgcagtgagccgagattgcgccactgcactccagcctgggcaacagagcgagactctgtctcaaaaaatatataataaaataataaataaataaataaataaataaataaataaataaataaaaaggagagagaaaaatggattagtgcccttataaagacagcctagacagaaaatccgtttctctaccatgttaggatgcagtatgaggatgatgatgacctgcaaaccaggaagaggcctcaccagaaacagaccatgctggcatcctgatctcagaattccagcctcccaaactgtgaggagtaaacttctgttgttgataagccatccagtcagtggcattttgttatggcagcagcccaaacagactaagagctttcatggattttctcaattagtcattccaccaaccctatggcgtatgctataattatctccatttaacggatgaggaaactgaggcttggtcgggaggtccaaggtcagacagcttgagaacggcagctcctggagtcagatccaggatggtggcatccgaggcagaggatgagaactggaggtcacggggagagcttctgtggattctggatgggagagaggagcggtgacagtctgtgctgcagggcgagccttgcctgacctcccttggatgcctcaatctgcttctgcctgctgcttgctctctcatttcatcctctataaaataggatgcagcagcaacaccactttttttttctttttttagacagggtcttgctctgtcgctcaggcaggggtgcagtggcacgatctctgctcagctgcaacctccgcttcctgggctcaagtggtcctcctggctcatcctcctgagtagctgggactacaggtgtgcaccaccacaccacaccacaccagcctaatcttttttttttttttttgactcagggtttcacctttgttgcctacgttggtctcaaactcccaggctcaagcatttcgccaaccttggcctcccaaaatgctgggattacaggcatgagctaccacccctggccagtgataccacttctgtacagaagtgtatttcttgcaaaatttacagaagtatatttgttgcaaggtttgcaaaagtgtattacagaagcgtatttgttgcaaagtgtgcagaagtgtattcatcgcgaggggttacaggagtgcatttgtttcctagcactgctgtgatgaagtactacagactggatggtttaaagcaacagaaatgtattctctcatcgttctggaggccagaagtctgaaatcaagttgttggcagggctggttcctcctgaggactttgagggagactcttttcgtttcttgctttttccctagcttttggcggtttgctggcttgtagatacatcatcccaatcccccatctttacagtgtgcctgcgttcacctggctgtcttctcctaaaggcatctgtcctgtgggatcagggacccagcctactacaggaggacctcattgtaactaattgtatcagcagtgaccctgttttcacattctaaggtactagtggtcaggacttcaacatatgtttttgtgggatatgaaatccaacccataacgaggaggtagagtgtgtgccagtgttcatcactgtttgcagcacatataatagtaaactctccatgaaagctctatactaggctcagaagggccctgaggacaccacgattatacacattcatttgtttttattttgtagttctgatgaaggagctggacacccttgccccagcctccagtgccatctgcccagacggaaggatgggaagagtgtagacatgaaagttgagtctcagaaaaggtagaacccaggctgggagtggtggctcactcccctgtaatcccagcactttgggaggccgaggtgggcggatcacctgaggtcaggagttcaagaccagcctggccaacatggtgaaaccccatctctactaaaaacacaaaaattaaacagacatggtggtgggtgcctctagtcccagctacttgggaggctgaggcaggagaatcacttgaactgggaggcggaggttgcagtgagctgagatctcaccactgcactccaggctgggtgacagagcaagactctatctcaaaaaaaggaaaggaaaggaagaaagaaagagaaagagagagagaaagaaagagaaaagaaggaaggaaggaaggaaaagaagaaagaaggaaagaaagaaagaaagagagagaacccaggtgaggcacaggacatgtgtggtgaccaggcttgcccagcagtgtcctaatcccccacccagcctttggcacacagggcctttaacagagggattggaggtatgaagtgggaacaggaccccaaggtggggccgttgtaattggctatgaaaaggcaatgggtggtgacggcgggactggagagaaggggaatgattgagaggttcatggggagagggtggatgcaaaagtggaatcattgagaggttcatgggaagcaggtggacgtagaagagatagaatcgatggtggtattatgggttacagtgtatcccccaaagagaggttggcatcctatcccctggtacctgtgaatgtgacctccgttgaaaataaggtcttggctgggagcagtggctcacgcctgtaatcccagcactttgggaggccgaggcgggcagatcacgaggtcaggagatccagaccatcctggctaacatggtgaaaccccgtctctaccaaaaatacaaaaaaaaaaattagccgggcgtggtggcgggcacctgtagtcccagctactcgggaggctgaggcaggagaatggcaggaacccgggaggtggagcttgcagtgagctgagatcgcgccactgcaccccagcttgagcgacacagcgagactccgtctcaaaaaaaaaaaagaaaaaaaaaaagaaaagaaggtctttacgggaggtagccacattaacatcaagtcagttgggtgggctttcacctgacatgactgatatcctcataagaagaggagaggactcagacacagaaggaagaccatgttagatggaggcagagattggagcgatgtggccacatgccgaggggcactgggaactgccaggtgctagaagatgccagaaaggactctcccttcaagccctcgcaggcagcatagactcgcaacgccttggtttcacagcttgagcttccaggactgtgagagaacaaatgtccattgttttaaggtgcctggtctgtgatgctttgtcatgagagctgcggaaaacgcatgtgggtgggtgtccaggagaaggagtgtaggattctcccaggggacgaagtggtcagagaacaggttacactaggtggcaaagggaattaaggatacaggtgggagtaaggttgctaatcaatagaccttaatatcgggagatgatcctggattatccaggtggaaccattgtcatcacaaaagtttgtttaaaaggcgttaaagaagccagagggatggatgtgagaaggactcagccaaccacgctggccttgaagagggaagctggagccctgagccagggaatgtgagtggggtggtccccacaagctggaaaaggaaaggaggcggattctccccccacaccagagactccagaaggaacgcagctctatggacaccttgatttcatcccagtgagacctgggcgggatttctgacctccaggactgtaggatagtgaaggggtattgtttttagtgtccgagtctgtggcgatttgttccagctgtgacaggaagcccacggcggcgtaagcaatgctgcgtggtttccaagactgggtcagaaatggggtaaaaccacgtccagactgtcctgggaacgttcctttgcagctggggtaagacgtccagctgggcagaagtggccacgcaggaaaggctgtttgggaggaccacccagaggtagagatgctgggtgtccagccatcccagtgcccagtgcccacctcctcccaggtcgggcatgacacgtgggcgcagacgccttcaaaaggactcagccctgagcgtcatcactgaccgcagccactggagagggcatgagcgagaacagaggtagctgagcccagtcacaaccaagaaacagagagagaatagcagatggtgactgttgccttaagccagggtgcgagctgagggctggctgctttttgcaatttaaatttttatttaattttaattttaattgtttttttttttcagacagagttttgctcttgtgtcccaggctagagtgcaatggcacaatctcggctcactgcagcctctgcctcccaggttcaagagagtctcctgccgcagcctcccgagtagctgggattacaggtgcaccccaatatgcttggctaatttttgtatttgtagtagagatggggtttcaccatgttggtcaggctggtctcgaactcctgacctcaggtgatccgcccgtctcggcttccaaaagtgctgggattataggcgtgagccactgcacccagcctaaaattttatttttaattgacaaattgaaaccgaagggttaatctgaccaggtctgccagctccgcttgctttcaggcatttgttttctgttattttttgttcctctttccacaaagctgaaggccatagtagctgaaggccgcaccgctgactgctcagatttaaccttcactggctattggatagataacattcattggtcaccatggtaatggttgcttctgttgttcaggaacctgggaaatctcccatcaagttcaaaccggttgagaccaccagccctccaagtgggcccctgcaaatgcctaagagatggctgggttttttttgttgttgtttttgttttttttttatttttatttcagtagcttttgaggtacaagtggttttttgttacatgcatcaattatatagtggtgaattctgagattttagtgcacctgtcactcaagtcatgtacattgtacctaatatgtagttttttattcctagtaccactcccaccctcttcctcctgagtttcttttctttctttctttcttttttctttctttcttctttctttctttttctttctttcttttcttttctttctttctttctttccttctttctttcctttctttctttctttcttttcttttctttctttttttactgagacagagtctcgctccgtggcccaggctggagtgcagtggcgcaatctcggctcactgcaacttctgcctcccaggttcaagcgattctcctgcctcagcctccagagtagccaggattacaggcacacgccacacgcacggctcattttgtatttttatttttagtagagacggggtttcatcatgttggccaggctggtctcgaactcctgacctcaggtgatccacccaccttggcctcccaaagtgctggggttacaggcgtgagccaccgcgcccggcctcctgagtctctaaagcccattccatcactctatatgcctttgcagactcctagcttagctcccacttacaagagacagtgtgcactttttggttttccatgatgtggggaaagggagtgtgaatacactgctggagagatggccttttgacctaagcggccaaaaactccaccctcagatcatgccagcactgccatttccagtacacgtgtcctataaaatgccatgaagcccgacgatgcttgtgcagtacgcaccagtcacttcattttcgccactgtcaatcacctttccgcaagcctcaggccaatccactcccccaacccatacatctcccaaagactcaccttcagggatgcagatctgagagatgttctcccacctccttccttggtgctcttgcaaataaatcttttctcttttgcaaagcctgtgtcagtgattgatttactgtgtgtgcacagagtggacctggacctgactggtaacagaatgaaacgtgtgtgtgtgtgtgtgtgtgtgtgtgtgtatgtgtggtacaatatgatgttctgatctaggtatacatttggaatggttatatcaagctaattatccatcacctcacctacttaccatttttgtgatgagaacatttaaaatctactcttagcaattttaaaatattcagtacaggccgggtgcggtggctcacgcctgtaatcccagtactttgggaggctgaggtgggcggatcacctgagttcaggagttcaagactagtctggccaatatagtgaaaccctgtctctactaaaaatacaaaaattagccaggcatcgtggcggacacctgtaatcccagctacttgggaggatgaggtatgagaattgcttgaacccaggaggcggaggctgcagtgagccaagatcgtgccactgcactccagcctgggtgacagatcaagactccgtctcaattaaaaaaaaaagaaagaaaaagagatagaaaaaaaaaggttgatcaaagggtacaaagtttcactcagacaggagaagtaagttttagtgatctatcatacagcatagcagctgtagtgaataataacacatcgtgtatttcaaaactagaatagtagattttaaatgttttcgccacaaaaaatgataagtaggtgaagtaatggatacgttaattagcttgatttaatcattccacaatgtatacatatatcaaaacatcacgttgtacccaataaatacatacaattattacacgtcaatttaaacatttaaaaaatctaatctaaaatgctgtggaatatttttccctaacagtaataatcaattggtattactcaaatgtctatattaactatctcgttcatttgttgtttttccgttttttttttttgttgttgttgttgctgtttttgaggccatggatttttttttttttttttttttgagattcgagtctcgctctgtcgcccaggctggagtgcagtggtgcaatctcgcctcactgcaagctccgcctcccgggttcacgccattctcctgcctcagcctcccgagtagctgggaccccaggcgtccgccaccacgcccggctaatttttttttgtatttttagtagagacggggtttcaccgtgttagccaggatggtctcgatctcctgacctcgtgatcctcccgtctcggcctccccaggtgctgggattacaggcgtgagccaccacatccggccgaggccatggatttttaagatgcgtattattcgaggcaccatgataaaagaaaaatgctgtttactaaattatgacaaacgttttaaaatctaaaaaatatgtcagaataaatgagatccattattctcttcctcaaacacctgttgcttctttctttgttccttgtctagaaccttattctgtggtgttggtaacgtctttatttggaaaatccatcccggactcagtgcagggcctgcgggttagcaggaactcacagatcccggactcactgcgtggcctgcggtttagcaggaactcatagataactgccgaatgtgcaaatgcacaagggatgcatttcacttctgaaaaatgtggatcactatgtttacaatgtctggcctcctacctcttttagaaaattttaaaacttaaaaatttaaattaggggccaagcgcggtggctcatgcctgtcatctcagcactttgggaggccaaggcagatggatcacctgaggtcaggagatcaagaccaatctggccagcatggcaaaaccccgtctctactaaaaatacaaaaattagccgggcatggtggcaggcgcctgtaatcccagatactcgggaggctgaggcaggataatcacttgaacccggaaggcagaggttgcagtgaaccgagattgcaccgccgcactccagcctgggtgacagagtgagactgtcacacacaaaaaaaaaaaaaagaaaaaagaaaacaatttaaattaaaaattatattataagcatatcacagaacatcagctggcctggtacttagcaagcatttaagaaacacttgccactattattaatactgttcttgccactttttaaagtcaccagattgagcaaataaaaattcaggctgcccagtaaaattcgaatttcagataaacaacaaatactttttgtgagattgcatagtttactgcccattgccaacatggatgcatagagttgatgcttaaaggtatgcaaaatttttatactaccaatatttacataagtattttgtcaaaagaaacaacaaattcttcaattaatttctgaagagtctacttacacaggcacgaaaacttattttaaatgtcttcagagtataggaatacaacaatttaagaataattttaccacaagagaaggtataaatagatcaaacaattttcttgcacagggtaataacattttaacaatacacaacatttttaaaacaaagattgtcttaagtggcaacccaattatgataattagagagataaatctgtaacaaatatcataaataatttttgaacacagagtgctgattctctttttatcatggttttttttttttacataaaagaaatttctttatattttcccaccattgacaatttatatacttgggaatgagcctgtttaaaaaaacaaaaataaagagtatttgccatgaatcaaatccgagtaacctggaaaaaaatctgaaaacttgtaatcaatatatttttacttttatgattttagactgtggtaaaaaccttatgcattctgcaataggcatcttgcccattactacaagaaatgatccttacatttggataaacacaaaatacccctcgtaatcagttcaaatacagtctaatactatatattatgaaaagtaggaagtatggtaagcaaagctagtacagttctttttcaaacctcaggcaagctgaacaaaagcttttaacctcagagtaatgaaggacaggcatcagtttcataaaatgatagatggctgtgacaagcaaagatttgtgcagtttttttgtttcatttaagaatgtagtgcaatattaaagtttaaagtttgttcaaaatgacagatcatctggaaactaaattgtagcaattgacatcttttagctggaaacacttaggaaaaatcaggtttgcttgtttttagttgaaaatgtcaagatttacagccatggagacattggatgaatctggaggtcagtgtgccctcaggatgtgtctttatgagcaattgttcaagattaaaagaaaatttatgctagaaaattgtgtttttctcggactaaaaatactacatcaggatgggcacagtggctcacgcctgtaatcctagcactttgggaggccaaggcgggcaggtcactttaggtcaggagttcgagaccagcctgaccaacacgttgaaaccccgtctctactaaaaatacaaaaatgagccgggtgtggtagtgcgtgcctgtaatcccatctactggggagtttgaggcaggagaattgcttgaacccagaaggtggaggttgtggtgaactgagatcatgcctctgcacttcaacctggatgacagcgagactccatgtcaaaaaaacaaaaaaacaaaaaaataccacctcagtttataagcttcctgtacaagttggaagaccctgctgggctgtatccctcccctgccccatctgctcctctccctgtctgcattgttcctttgcatcgcattgaagatctcaggccctcccgtaggatggagcaggaaagattcaggctagacatgtccccatcaacccccacccctacccactgaaccctggaactatgagcagaaaccacaccgctccttccccaacagaggtttcctgctgctatgtggccaaaagagagtggggaggaattctcaggacacccagaggtggtacagtccaacctgaccacagggagggaaccccggcccacacctgccctgcccaggtgagtgtgtagaggggcgtgagaaggaggtggtccaagtcctccctgattcaagaaagctctgaatttcccctgcaatgagcttagtagaattcagagacctacctgtgacaacagagactcagagtgctctgagaagctcttcattcattcattcattcatgccattgatatttaccttgctaggcactgggaatacgtgggtaaagacacgtattcctgccctcatggggcttctattccagcagatgagaagccgaccagaacaaaaatcaatcagagtcattgctaatagcagtcactcactacacaccatttgacatgtaaagcaagctgacatgatagtggttgtgggagaggtggggagaatttctctaagaaggtgacatttcagcaaacctttgactatcaagaatgacctatcaggaagaatccaggcctgggaaaatccagagagagcgagacaggggagggaaacggcaaactgccaaggttcagaggtgggaacgagcgtgcacatccaaaggactgggcgaaggctggtgcctctggggagcagggttacgtggggagggtcggggactggagctggagcgattgtttggagcccggtaggcgctatgtgtgtttactgactgtactagagatttttttttttttttgagatggagtttctctcttgttgccccagctggagtgcagtggcatgatctcggctcactgcaacctctgcctcccaggttcaagggattctcctgcctcagcctcccgagtagctgggattacaggcatgcaccaccacgcccggctcattttgtatttttttagtagagataggggtttctccatgttggtcaggctggtctcgaactcccgacctcaggtgatccaccaacctcaagtgatctgctggcctcggcctcccaagtgctgggattacaggcatgagccactgcacccagcccttttttttttctttaatcaagatctctgtcccacaagactcccatgggaacatgggctgtatgaattttccaggggctgacatagcaaagcactgcatgctgagaggcttcaacagcacggatttgttttctcagagttctggaggctggaagttcaaggtcaaggtgtagcagtgttggtttcccctgaggcctccttggctcgtgcacggggtcgtccctctgtgtgtgtctgtgtcctaatctcctcttcttataaggacacacacccgttgaaagagggcccacacttaaatcctcattttaaggtaatcacctctttaaaaatccagccccaaatacaatctcatcctgagatactgagggtcagggcttcaacatatggatttcttttgagggagtaggacacgattcagcccataacaaggacagagctggcttgcgtttgacgatcattgcgttctgcgtaccttgaaccgttcctggcagaaggcaaggactccagcaatacatggagtgggcgggtggagagagcagataatactgatttcagtaccactcagagggcactgtgaccgccaaccgtttgcagaggcgtgcgcaactgtagttctgcagaccttggctcaggacgtgctttagtgtgcccggaagaggcacctgtgtccccggctgaggcacagcaggcctggcctctcaatcctcctctgccatccgtccaccctgtcctcccctagggagcacctacctggtgggaccactgaggcgggctcgggctgtcaccagggaaaccgcagcagggtgcggaaggcgagggggttgaggaatgaaaagaggaagtccccaaaaccagacttggagggtggggactcaaaacttcagcttggcacaagtaggtacttaataaacgtttgttgaaaaaagcaataagtacctttcaaagcattacctgtcccaagtgtgtctggactgaaacaagaacgtcttttgttgcaaagcaaaatgctctgtgaccagctcgtacggatgccaggagaatggggatcttgtttgttctctgccaatagaaatgtattagtgaaagtaagactttaaaacctcagcactaagtggtttcggcattgactgagtgcccagccgctgtttgagccacgtggatgtgctcgttttattcttagagttactgtgtgtgcattctgggaggccagcggggaagtttccagaaattgtaagaaggtaatggcgaaatggatggcttaggaacacaggcaacacctcggctgagtttgaggccacggtccgtggctccggagctcggcgtccagccaggatgctggactgcagaatatgccaaccttcttctagacccatttccagtgttttaaatgctgatagtacacgctacctcctattccctacatgtcctaggtgggtgttcataggcacataccataaaataaaaaataaatatcatgaaattaaaaatcatacaacaaatcataaactaaaaataacattaataataataagacccacgtgcaaagaggggggaaagccttcccgcagggtccttgcgcattgcttcctcccacgtgaccccagacgagccgcctcacttctctgagtctctttccacttctgatgcagacaatgacgccacgcgtcccaccccacagggcggctggaaaaaggaaatgaatccgtgcgtgtggaaacgcttgggatagtggcaacacatgctccttatgacatcgtgtcagagaggtgtttgcacatcaagcttacccaaatcttcactcctgttttcagcagagctgcccaaacctcaagacggtccttccttcccctcctcctcttgcagcccctgcattccatccctgactcttccgcgagctgcagcaggaaggattcaggccatacacatgaaggagcaaggctacccctggggccaaggccacccctcgcccacccccgtctctcccaccccgggtagccgtcactgccgcagagcagggggaacgtgtcccaggtcactgcaccctctgctgtgtagggactggggtcatttctgaccgaacatcttactctagggcctgagattcagtgtcgtgggggactgagtctgaatccttcccgggcagggctcaccagcagaattcagatggaaactgtagagtgctgtcagcaggggtgtgctggagccagcttctactggaggacaggaaccaacgcgtcaactcgcaggaagtttgtgagatgtttaagcacatcgtttagtaaacaggacactccatgcactttcaaaattaaataaatgacgtaagccgggcacggtggctcacgcctgtaatcccagcactttgggaggctgaggtgggcggatcacctgaggtcgggagttcgagaccagcctgaccaaaatggagaaacccccgtctctactaaaaaatacaaaaattagctgggcgtggtggcgcatgtttgtaatcccagctactcgggaggctgaggtaggaagatcgcttgaacctgggaggcggaggttgcggtgagccgagattgcaccattgcactccagcctgggcaacaagagcgaaactccgtctcaaaaaaaaaaaaaaaaaaaaaaaagacgtaaagaacaaaggtaggaaacaccctaaacatacgctttcctagttatttaaatacattttactagcgtctgtgtttgggggtgattgacatccattgtgtctgcagtagatgtgggggctgctgacctcctcccacctccatgcccagcgagcaggccggctcctgcagctgcccatgctggggaggcatttgcaccatggaagctggcaaacaccaccgggcacgccaccccggcctccagagttggctgtccagcattcaccagctccccactggctgcaggaatccaattctttactctttcgggtgtaagtgcttatttaggaagccctccggtaggctggtctgtgctccacgcatcggggtacaacggtgagcagaactgcaaagagcctgtctttctgcatcttccattttgtgagaatgaaaagaaaataaacataaaactcaacccaggaagaagataatttcagaagattctaagtgcaagaaagaaacagagtgaggtgatactaacgggcaaatgttactttcttttttttattattatactttaagttctagggtacatgtgcacaacgtgcaggtttgttacatatatatacatgtgccatgttggtgtgctgcacccattaactcgtcatttacattaggtatatctcctaatgctatccctccccccctccccccacaacaggccccagggtgtgatgttccccttcctgtgtccaagtgttctcattgttcaattcccacctatgagtgagaacatgcgttgtttggttttttgtccttgcaatagtttgctgagaatgatggtttccagcttcatccacgtccctacaaaggacataaattcatcattttttatagctgcatagtattccatggtgtatatgtgccacattttcttaatccagtctatcattgttggacatttgggttggttccaagtctttgctattgtgaatagtgccacaataaacatacatttgcatgtgtctttatagcagcatgatttataatcctttgggtatatacccagtaatgggatggctgggtcaaatggtatttctagttctggatccctgaggaattgccacactgacttccacaatggttgaactagtttacagtcccaccaacagtgtaaaagtgttcctatttctccacatcctctccagcacctgttgtttcctgactttttaatgatcgccattctaactggtgtgagatggtgtctcattgtggttttgatttgcatttctctgatggccagtgatgatgagcattttttcatgtgtcttttggctgcataaatgtcttcttttgagaagtgtctgttcatatccttcacccactttttgatggggtggtttttttttcttgtaaatttgtttgagttctttgtagattctggatattagccctttgtcaataggaagaatcaataacgtgaaaatggccatactgcgcaaatattactttcaaaaggaggtcaggaagacttcctggaggaggcgaatgcacggtagcactcactcccaaagggtcggaagtacccagtaatgggaagatctggggaagaagttgtgggcaggtgcaaagtcaggaagaagcctgaggtgcccagacaacacagcggcacataatgagtggtggggagagagataggaggggaggctgctaggtgctcagcagaggctgcgttacagatggaccctgaagatgggggtgaggagacttgatggcttgatactgtttgatagcactgacagctattggagggtgatgactcaggaacttccctcaccaataagcgtttcttaaaaaaaattactctgactctacaaatatatatgtatatataatttaaccacattttactagcatctatgtttgggggttactgacatctctctatctatctatttatctatatatttggaggatcagagtaatttttaaaagaagtgtctatatataatgtatgtagaaataatatataaataaatacctatataaagtaattatatatttttatatttttatttatatatttcacttaaaatatacatttttaaatatatatgttttgttttgtttgagagagtcttgctctgtcaccttggctggagtgcagtggcaccatctcggctcactgcaacctccgcctctcaggttcaagagattttcctgcctcagcctaccaagtagctgggattacaggcacctgccaccatgcccagctattttttttttttttttttttttgtattttagtagaggcagggtttcaccatgttggccaggctgttctcgaactcctgacctcaggtgatccacccacctcagcttcccaaagtgctgggattacaggtgtaagccgctgcacccagctgaacccacctttggaacttagtgagtgtctcgccctaagtgcctgtcagctggggcacttcctctgtgccctacaaatgttcctcaaactgaaattctttagaacaatgcaggaagaatcccatgcaatggcataaagcactgtaaactatttcacttttattactccggaaatttatattgctttttattttccgtaacctgaagatatatgtgctagttccttggggctgggacattaagataagttgtgtggtccttccttccaacacagctaccaccctgggctcctcctctgggcacactgtgggcgcctgctgctcgcaaactgtgataaggaaggagctgttttttctaagatcactgggatccattaagggctccgcaggagaaagacagaacttctctttaggatgatgaaagatgagggtgtcacaggtggtgactcaaacaacaattgagaggcaaaggggtctgaacccatctgcaaataaatatcatttgaatgaatgaacgagtgtatccaggggtgaagcgggaacagaagtcatggtgaaccactgacaggaggaccgtggtgggaacccttcctgcgctatgaaggcagagttgaggtgctgtagcctagactgtagggaatcccttttgccacatcaggtgacacccactggttctagatactaagatgtggatatcactgggggaccatcattcagcccaccacagatggatgagtagagaggttaatggatggaaggatggtaggtgaaaggatggatagtagagtagatggatgaatagtaaggtggatgattggatggaagagtgaatggatagatgggtatacagattgatgggtggtgggtggatgattcctgtgatccctgcctcgcttctcagctaagctactctgatgtccatcactctgacctgtcccccgacagacactctcacttggtacagacctcagaagcaggctctggtggtcaccatggaaatgcgattggatgaggaaggtaagttgctgaggagtgggcagagagactctcagatgctggaaatttccagactctggagtgaaattaaggtgtgtaaaagggactataggggaggggcaagagtgagaccacggaggaggatgttgcaatcgtccaggaatcatggtggtggaggtcactaaggttgtgcagcagacactgaaagaaaaagaaaatggctcctgacaaaggagggggaaatagcaggaacagataggaaaggcatttctgactggagaccttatacacactacaaaaccacaaacatacctttaaatactgggcacagtgtctcacacctccaatccctgcactttaggaggccagggaaggaggatcgcttgaagcaggagtttgataccagcctagactacaaagtgagatcccatttctacaaaaataaaaattagctgggctcagccgagtggggtggcacatgcctgtagtcccagctactcaggaggctgaggcgggaggctcgcttgagcctaggagttgggggctgcaatgagctatgattttgccactgcactccagcctgggcaacagagtgaggccctgtctcaaaaatacacacacacacgcacacacacacacacacacacttaaaaaacaaaaggttgaaaatgaaacacatagtgaaataaaagttctgatagtatcttcccaattgctccacctcactttagagtcaggtgagggaggatggtggcggaggctgcaacacagtggctgagacatcgctctcagcgtgtcaccgtgaggtctcccagggagggtgtggagaaaacagtgcccaggacagagcctgagaaacctcaccgggaagatggagcataacaaggaaagcattactcaaccattctgtgtcactgaagtgtgtacacaattagcccatctgttgctcaccctcctcattcaccaacccctattccaagaaatttaaatgcccaaaataggacttcccaccagtgggaggtgttggcagccaacacagaggagcagctccagaatccagggagtttgtttgaaataaaactgacctataacaaagagagacaagtatctcttcaatccctaccatccctccacctacccacccatccatccacccatccatgtatccacacttccatctaatgcacacaactatccaactgtccatccattcagccacccatgcaacaacccacctaatgcattaattctgtcattcttccaattatcaccacccacccatcacttcatacacccatccacccaccacccatccatccacatacccccatccatccatgcttccatccaatcatgcaccctacacctgtccccccacccatcacttcatacacccatccacccaccacccatccatccacatatccccatccatccacccaccacccatccatccacatacccccatccattcacccttccatccaatcatccaccctacacctatccatccacccaccacccatccatccacatacccccatccattcacccttccatccaatcatccaccctacacctatccatccacccatcattccatacatccatctacctacccatcaatctgtatacacatctatccattcacccttccatccaatcatccaccctatacctatccacccacccatcattccatacagccatccacccaccacccatcaatctgtatacacatctatccattcactcttccatacaatcatccaccttactattaatccatctactctactatccatacttccacccaccatccttccatccattaacctatctactcatccatctgtggtgagctgaatgatgaccccccacgtcttagtttccagaatctgtgagtgtcacctgatgtggcaaaagggattccccgcagtctaggttacagcaactcaactctgcctttatagcacaaaagtggtcctagacaaaacacaaatgatggatgtgtctatgttccagcacaactgtattgtacaaaagcaggcaggccatagtttggcaatcagccatcttgttctgaatgatcaggcccctacttcactttccgacaaatctctatccactttttcccttgctctctccaccgtagccacactggcttcctcgatggtcctcaggctgggcagtcatcagcctcatggcttttcaagacatacattcttctgtctggactgtttttcttcttgatattcccataattgttccctccctccattgagattcaaatatcaccacctccaagaaggcatccttgactcccaatctaaaacaccccacccctgctctttgaatctgacttattgttcctgataacactcgccaccacctgaaatcttacctatgttcccatgtatcacccctgctagaatactcatgtcccagcatgtgaatacatctgttgcgttctctgctgcacccaccacgcttggccagggtataccactaagtatgcgcccagtaaataccagctgaaagacaggatggatggatgcgtaaatgagggcatgaacagctgtctgtcctaagagtccccggctccttttttcacattatttcactctccgtgtctaaagcagtgtctggagggatgggggggctcgatgaatatgtctgactgaataaggacgtgaaatgctgctgcttagaagatatttgggatttctgtccacatccacagtggcccctgaagccatttttctacgttttgcggagacgctgctgctgctgacgcatttcgatgtgtgcaaaatacgcacatgaacagccgatacggacacttttgatgtccgtccctctgccctgttccctgctcactcggtgctcccaaccttctagcgaatggtgcaggagctcaggttgttgccatggaaaccccagctggaatgggggaggcaagtgcgtggggaaggtgtcgagagatccgcagaggatggaattttccagactctgcagtaagatgtgagctccacattgaaggcctggaccaatcgtctggcctcacccacatctctactgacctcaggactctctgtgtccgtagcccctttgggtctcctcatactctttggcagtctggagttccgggtctatttctcctgtgagtcctttagaaaggctgtctgctccttgcatctctctcttgctctctcgctctctctcttccctctctctttcctctctcctcttcttcttcttcttcttcctcctcctcctcctcctcctcctcctcctcctcctcctcctcctcctcctcctcttcttcttcttcttcttcttcttcttcttcttcttcttcttcttcttcttcttcttcttcttcttcttcttcttcttcttcttcttctcgatctcagctcactgcaaccttcacctcccaggttcaagcaattctcctgcctcggcctcccgagtagctgggattacaggcgcccaccaccatgcctagctaacttctttgtatttttagtagagatggggtttcaccatattggccaggctgctctcgaactcctgacctcaggtaatccacccaaagtgcaccctcgccctcccaaagtgctgggattacaggtgtgagccactgcgcctggccctcctttcttctttctctctctcttttcctcctctctctcctctctctctctttctgttctcttgcctctctctctctctttcctctcccctcttctttctctctctcttccctcctctctcctctctctctttctcttctcttctctctctctctctcttattcccctctctgctctcactctctctctcacacactccctcgggcaaaataacaaccctggatcactccagttcccactgccccagatcctcatttttgtttcagctcttattgtcagtccagggggtccatgctcaggtttgttaagtgggtatattacataactcttaggtttgaggtataaatggccatcagcactgtacccaataggtggcttttcacctcctgccccctccgtccctctcccctctagaagtccccggtgtttattggtcccatgtttatgtccgtgagtacccaatatttagctcccgctcataagagagaacatgttgtatttggtgttctcttcctgtgttacttcgctgaggacagtgggcagccttgtgcttttagccataatcagcaacttgattggaatgaatttccagctgggtcccttgtcataggagggctcgtggtaccttctgggaaacattcctgcatgcctgtctgttcccatgtctgccaaagttgagtccactccgtgatcttaaaaattatgtattatgtttagtttaataaacagtattatagcacttactctgtaccattcagtcactgaggctcatttgaggtatgttctaatattatctcaattttcgtatgaggaaatggaaggacaggaatggcagtaagttgtgcaccttcacccagctggtcagcagcagatctggggttcaatgtcaggcagcaatcccccatagtctgtgctttaaaaagaccagggctgtgcccttgcttgacacatctctgagggtggcccatgctctgatgtccgttttagagatgaggcagctgaggtaccagcctatgaccttagaaacgagttagtcattctctgactctatttcactcaactattttagtaataacattttcaacagagtcttcaaggagggttagctagttatttgtaaattgcatgctactgcagcaatgtgacacacacacgcgtgcgcataagaaatacatcatttttaaagacaaaatttaaaaaatagaaataattttctcacaatgtcccacttaggaccccattgggccaggcaagagggagtggtggcttaaaacagggtggtgacaatggagattggggaactagggatgatttgaaacatgtgggtgagagctaacctgtgcaaaatgtatcttgggattcttgacctgtgggtgatggactgggtttgctggcaattcgatcagctctgacttgcactgtctgtactggatgctgtcccacgggagcagtggatgggtggatatctgtttctggagctcatgagggagtctgggctggggatggagatttggggacccattgacacagggggtcattggagatcagatcacagtgttgtgcattgcacaactccagggggcaccatccaggggcaccatccacggggcacaactccaggtggcaccatccagggaataccatctgggggcaccatccaggggataccatccagggggcaccatccaggggataccatccaggaggtaccatccaggggacaccatccgggacaccatccagggggcaccatccagggaataccctccaggggataccatccagggggcaccatccaggggataccatccaagggataccatccagggggcaccatccagagggcaccatccaggggataccatccagggggtaccttccaggggataccatccagggggcaccatccagggggcaccatccttgcggatgacgctatgagtaggacctcaccaagattgccctgggagtgcacggggagaaagaggagcattcaggacttgattaactaatcagaaagacgagaattgatgatgaaaatatcactcaacctcccccaggtcttgggagcccaccccttgcatgagtgtgccctggatgtggaacacggagtcaaataagattattttggagctttaagatttagtgactgccctactgggttttggatttgcatggggcctgtggcccctttcttttggccaatgtctcccttttggaatgggaatatttacccaagacttgtacccccattgtatcttagaagtaactaacttgaaggctaataggtggaaggaacttgccttttctcagatgagacttgggactctggccttctgagtgaatgagttaagactttggggacttttgggaaggcatgattgtatcttgcagtgtaagaaggacatgagatttggggggccaggggaagaatgaaatggcttggatctgtgtccccaccaaatctcatgtcaaattgtcatccccagtattggaggtggggcctggcgggaggtgactggatcatgaggatggatttctcacggagggtttaacacaatccccttgggctgttctcacggaagtgagttctcacaagatctggtcgtttaaaagtgtgtagccctccccaccctctcattcctgctctggccatgtgatgtgcctgttcctgcttcaccttccaccatgattgtaagcgtcctgaggcctccccagaagctgagcagatgccagcaccatgttttctgcacggcctgcagaactgtgagccaattaaactttttttctttataaattacccagtctccagtatttcctctttttttttttttttttttttttttacggaatttcactcttgttgcccagcctggagtgcaatagtgtgatctcagctcaccacagcctccacctcccaggttcaagcgattctcctgcctcagcctcctgagtagctgagattacaggcatgtgccaccacgcccagctaattttgtatttttagtagagatggggtttctccatgttggtcaggctggtcttgagctcctgacctcaggtgatccacccgcgtcggcctcccaaagtgctgggattacaggcatgagccaccgtgcctggcctcaggtatttctttatagcaatttgagaatggactaatacacaacctcacaagtgttttcatacaaaaaggaggccatcttttgtaaaatgtccatcccagaaaataaccatcgattatccttgtagattcactgttacttccaaatatctgtgtgtgtatgtgtgtatgtgtatatgtgtgcgtatcccaaagtcatgatattcacatgggggtggtgtagacagaaaacagggactactagaattcaaaattaaccctaatccttggagaagaaaaaaggtgtctattctatttgtagtattcatccaaccaaccatgtaaacatttatttacacatccacacatctattcaccccacgttgatccatctgcccacccacccatccttccacatagtcacccatccatgaatccattcaaccacccatcaattgatccatccacccatctattcatccagcaaagaaagaaaatatatctccaagaaaaaaattgtgagctccgtaatgatacatttattcatgtatttattcactaaatgtaagctgaaagtcactttccagcccctctctgaattcgcctccacccattctcttccttgctcactcctcttcagacactgtggcctcctgtgctgttcaaacggacaaaaatcttcatctccaggtgtttccaggctctgttccctctgcccagaatggttacttccctggtaatccaaagtttcccgccctcccttcactcaggttgactcaaataccgccacctccaggaagacctccttgaccggctgctctgaaagatccctccttcactccacatctcacctgcttacgctttgtagaacttaccacgatctgttattttaagttaaacttattgactgataaacccccaaagataaaggattcataagaggagagttgtcttggcttcaaccctatccatcacatttaactcagtgctgacccatagtgggatgtcaggaaatatctgcagaatatacatacatacacttttttttctttttgtttttctttttgagacagagtatcaccctgccacccaggctggagtgccatggcatgatttaggctcactgcaacctccacctcccgggtacaagtgattctcctgcctcagcctctgagtagctgtaattacaggcgcccacaaccacgtgctgctaattttcgtatttttagtagagatggggtttcaccatgttggccaggctggtctcgaactccagacctcaggtgatccacccacctcggcctcccaaagtgctgggattacaggcgtgagccactgcgccccgcccacatatacttttgaatgaagaaaggaatgaatgaataatctacctgagcacagagattgggcatttatttatttatatttattctatggttttgtttcccagatgcagatggagcgtgtaaaacagaaagtggctccatgcaggctgctaggtctgctcacctatctcatgatctacacgcacacacagcgcatacggactgagtcagtgcacgctagaacataaactgcttctgttgctggtgctcagaatagattcatgattttactctgagtcagtgaaggctctcgcagccgctggtaaatttgtttttctccttcttcaaagatgggtagcaatgacgcacttcagcgcgcacaagatccgcagtcgcacggctgaggttgagacggcgccaggcaggccgcgtccccagtgatgcgaatccgaagccccccgaccgctgcccttcccacgcaggaccccgcgatctgcggggacagaggcggcgcaggctgctgccatggaaaccgaagctgggggagggagttgggggatgcagaagggcctgacagccccttagaggcccgaatgtccacccctctgcagtcaggttgtacccagtcaccaatcccagcctggcacacagtaggcctgcaacatagagtggaaagccacagtctgcgccccccatcaccccgggggagggggctccctccagcatcctggagcctggccttccttgaatccgttttccgaaggcgtttctatcccgggccccacgtcgcggggtggcgcaacgtgagccatgtatacaaagcacctcctgggctgctttgtggaaaacaggctgggcaggcagcattgctgagaacagaggctgaggcttctgcggacacccaggaaaaagccagagtgacttggatgccgttgaggatgaggaggatggacagagtgatatgaaaattgtggatggaaatagttatgccgaggcagaaaagagagacatcctggccacgcagcgccagcctgtcctgttttattatttgaattttatttgaacccagaagagcagaagctaatcactactcagccttgagtgccgcgtgctagtcctgccacacagatgatctccatgcatcctcacaactccccacggctgagtgcggcatggtagtcaccaccacagaacgaataaggaaactgagtctgaaagaggtgaaggcaactgccctaaatcagaggactggaaaacacggagctggatttaaccccaaatctgacaccttcagagcataaacgtggtgcacccacatcattcaagcttgaagttgagtcgggtaatccattcaaacagaaagacgcttaaaatattgtggtagcccttggaccacttctcttctctccttccctctcctcccttctgttcccttctcctcccctcctttgtctcttctttccccttctctcctcgtcctctcgtctccctcctcctctcctcatcctctcttctccgtccccttccctcccctctcagcccctcttctccctccccttcttcccctctcatctcttctccctccacctccctcccctctttatcccctcatctccctcctcttccctcccctcatcccccttctccctctgcttccctcctctctcatcccctcatctccctccccttccctcctctcatctcttccccctccacctccctcccctcctcgtcccctcttctccctctccttccctcccctcctcatcccccatctccctccccttctctccccctcatcccccatctccctccccttccctcccctcctcatcccctgttctccctctccttccctcccctcctcatcccccatctccctccccttccctcccctcctcatcccctgttctccctccccttctctcccctctcatccccccatctccccccttccctccctttcatcccctcttatccctccacttccctccctctcacctcctcttctccctccccttccctccctctgatcccctcttatccctccacttccctccctctcatcccctcttctccctccccttccctccgtctcatctcctcttctccttcctcttccctccctctcatcccctcttctccctccccttccctccatctcatctcctcttctacatccacactccttggtgctgttatccaatctcacaggtttaaatggagtccatacactgatgactctaaaatctgtacctgcagagtcctgacactcacctgaatccactgcctccccttcccagtcctgactcacctgaatcttctccctccccttcccagtcctgacactcacctgaatccaccacctccccttcccagtcctgacactcacctgaatcttctcactcacctgaatcttctccctccccttcccagtcctgacactcacctgaatcttctccctccccttcccagtcctgacgctcacctgaatcttctccctccccttcccagtcctgacactcacctgaatccaccacctccccttcccagccctgacactcacctgaatctgctgcctccccttcccgagcatctcatagctttcccaaactcaactaatattccctgagtttgtatatgcaccaagcactcttctaattgttttacagttgttaacatatttaattccttcaacagctgtaacgcccattttacagatgagaaatctacggcccaatttaccaaaggaactcactagaggaaacagtgagtgggagactccagtttacatggagctcctccatgatgcctggtctcagccttccgtgtgccacctccctcgttccagggtccttatgaggctccgttgtcctctgggcctttgcacatattgttcccctgccttgaacactgttccctgagcttgattccaggctcttcatcatcaacctgccccactgagggcaagttagtaaactcccagaaactctgtgtttcatcagtcattgatgttgggcatcttaggacatacctcataagggtattgtgaaaactaattacaacaatatgctggccgggcacagtggctcacacctgtaatcccagcattttgggaggccaaggtgagtggatccttttcttgttaaattgatagctagattgattgatagattgatgacagacggatggaagatggatgggtcgatgggtacatggcagaatagtcaggtggatgtgtggatgaatggactgggtgagtggaaggatgggttgatgggtggataaatggatgtgtttgtggatgaatagatggtcggatgtatacatggacatgtggttggatgaatgtttggttgagtggatgccacacataaacacttttcttttccaagggtgagttttgagttctagaagttccctttgttttctgtctacgttaaccacatgtgaatttcatgacattgggacacacacatccccactcagaaataaagtagcaggggatgaatgaggaaaatggaaagatggcctcctgtttccctgctaacacctgtggggttgaatgaggttttcatcatcaatttccatcttcctgattcatgagtcaagtctctcttcctacaccctcctgactatctcggtgagatttgcattcacgatgtcatacgcaaggatggtgcttctttgagttcatctggaccagagacatctgtacagtagctggtatgctcatctctgcctacacttttttatttcatgagacagggttttgctccatcaccctgggaagaggctggagtgcagtggcatgatctcggctcactgcagctttgacctcctggggtcaagcaattctcccacctcagcctccctagtagttgtgactacaggcatgcactaccatgcctgactaatttatatatatatataaaaaatacacatattatatatataatatacatatataaaatatacatattatatataatatacatatataaaatacacatattatatatataatatacatacacatattatatatatataatatacatatacatattatatatatatttgtttgtttgtttgttttgagagggcgtctcactctgtcacccaggctagagtgcagaggcgtgatctcggctcactgcagcttcaacctcctgggctcaaacgatcctcccacctcagcctcccgagtagctgggactacaggcatgcactaccatgcctgactaatttatatacatatacatatattatatatatatatatatatatatagagagagagagagagagagagagagagagacagagacagagacagagacagagtctcactctgtcacccactgggctagccctctttctaagcttcggtgtgcacgtgaatcccgtgaatatttattaagtgcacattcggattgagtaggtctgggatggagcctgcaattctgaatttcaggcaggttcttaggggctgccaaggctgctggtcttcagctcacaacgtgtgcagtgagttcatgctctggttgacctttaccaatgtttagttatacccagaaaacatttgtgagctaaatataaatatatacaatacttatagaaaatattaaatatatttagtaatacatttattacatattcaatttagtatataatattattattatatcaatattatacattataacatatatataattatatgaatttagtttatattgcataatataaataatatgtaacattatatatagcataatatatattatgtatcatcatatgtgttatataagatatatcatttgacatatgtattatatataatatattatataaaattatatataataatcatatgtgattctataataatttaatacatttaatatacaatatacaataatttaatatataatacatatttaatcctatatttatatatttagtaactatattatatatatttaataatataaaatagtatttatataattcatatgtatagtacatgttaataaatatgcatgtttataaatgaataataaatatacttgtttataaatcatacaaaccactgtaatgtataatataaaacaagcacaaaatgtaagaattttaaaagacatgacaacataacacatagaaactgaacttgtaatggtatcattcccacctcagacatcaccattgtaaacgggagatgtagcttagaactgagggaagaaacggaagtaaagagaacaggaaaatatagaaagttatctaatctgttgagggtctcctgaagatacatttctgagaccaacttgatttgctgatcaactagacgggtgacaaggatgaggttgatttttaacaccactgtacctgaagctccaggagattgggagccgccacccacgtgtgtaaatgcgccatgggccacacgtccagtccatgtcccttccattcttccttctaaacagcttgctgataaccctgcttttcccacatttccttcctaaattactgcagcaaccccgtccatttcttcagcccctcaaagtgaaatctaaaaagtcctcttcattccgtagctcttcttggggttcctgcagctcaggataaaactcgactcccctacaaggaccaaagcagtggacactctttagtttgaccctgggaggagcttggtcagggaaggccgacagccaatgggacttgtcttgaagctgctctttgcttcaaattcttaataagcagtctttgcaccacttatgagtgtgtgtttgtgtgtgtgtgtgtgtgtgtgtgtgtgtgtgtgtgttctggtcgctccataacaaacaccccaagcttaacaacatgcaacaacaattattttgttatgtttgcagattcataaagtgcaaggtgcagatggcttctttctagtccagtatgtctggggctagaattaggaaggaaggaagtcagttaggaatattcgatggctgggaaaagcccaacatttagaggggtgtaaagtgaggttagaaagtactaacagtgaaagctgtatcattgcctgtcttataaactatggcggtagttctcaagctgggatgctcttatcccccagtggacactggcaacgtctggacacagttttgattgtcactactggggaaaggaatgagttctgggcatctaatgggtggaggccagggatggccttcagtgcagaggacagtccccaccacacacacaacaaagaatcatccacccagctccaaacgtcatgctgtagtttggaattgccttcaacaagcatatctgaaaacaggtttgtatcgtggcaaggaaacgtgaaatgtgctcacataagagccagctgtgcgctgcacccctttacaagcatgtaggacaggaattcattatgtcagacaatgagaagaaaagacagccagccccaggaaattaaagaaaagctggctatcaacagcatctaggggcacaatctgcaaagcagacagctgcaatttgaatgtttggatggttcagaaatggacagttctgcactgctggccatgatgagctgtttccaagagctactcccttcctgagtttcctggagatgcatatatttcctggacctcagctgaaccctgggtttgtctcttggagggaacaatccgtggtgggtcagtgagctgagcttgagtcgcaactggactgtcttgactttctaactgcatcttgttggataccatggacttcatgttgtaacaataagtatctagtcaggcatgtgcaaggtgggagggggctctcccgaccccaccaagaatgtcaggtgaccatcaggtgatggccagggagttgtcacactgcctttctaaaataataactggtcacagccagtgctcggtaaaagcagtttcccaattgataaaaaacacctgaaactggtgattggcagcttcccactaagatatcaagagtcgggcgagtgggctggagcatgcccatgaagagacaaaatggtggagcttaactggtatttgaccttctaggggcattccaccgggaaggggaagagcgcctcaggtgagcgtgcacataactccagtaaacacgctgcatgtgtggcccctcccaagtgctagcaggccaccgagcatgcaggcagctcatgataagaggagaatcaagggaaatgggatgcaagatgctggaagtatgccagcatataaaaccctaagtccacggtcaaccagggcactggtccttcaagttgcccacttgggcctcttccaaaggtactttccttcctttcattttttctgggggggacccacaagtcattttatttaggagaccatctattctgcttttcttttggctactttttttctttatttctaaacaaaaacaaaaaacaggacacatgtgcacagcgtgcaggtttgtcacataggtatacatgtgccatggtggtttgctgcacctgttgacctgtcctctaaattccctcccctcatctctcaccccacaacaggtcctggtgtgtgttgttcccctctctgtgtccacatgttcttaatgttcaactcccacttacgagtgagaacatgcggtgtttggctttctgttcctgtgttagtttgctgaggttgatggcttccagcttcctttccttttattcttgcctttcattctaaagctttttaataaacttccactcctgctctaaaacttgcctcactctcttcttctgccttatgccccacagtcaaattctttcttctgaggaggcaagaattgaggttgctgggcacccataaggattcgcctctggtaacgtattttggtgctgggtcacttggataatttgcattgctaacaatatcagaatgttccctccaactgaatcttctttttcatgcaagactggacacatccattctgtgaggtgtgtttttagagaaaaaattaatccatgatacttgttaaagtggtaaggaacactttcttcaggaccatggagataggtataggggccacagcaatgggatttcacactggggcagagaaactgggcttaactctgaatacagcatgagcaagtgcgaatgtatagcccaagagcagggtaggtgtcagtggatgaaaaattattgagagaaaatcaaggtggtagcctggctgtgttcactgttccatgctcagtgttcaagagatgtacttttctgaatggtgaaaaatggtatctgagtccattaagattgtcagggaattcaggctaagtagcctctcagaatccttgctgaagacaagccaggttggtcagatgttatgtaggggttcacagagggtgaggaacccaatcaggcatcgaggaaagcacaaacctgaggaaatagacacttctgggaactttacaatggcaggagtacctgcaaattggattttctgcagagacacatttgccaggttacaacaaagtcacctgaacagatatacactgctttttaaatatataattcaattttgtgaaggtagggcctcactccatcactcaggctggggtgcagtggcacactcacggctcactgcagcctcaacctcccaggctcaagcagtcctcctgcctcagcctcccaagtagctgggaccacaggcacatgccaccacactcagctaatttttgtttttgtttttgtcgtttttgtagagatagcgtttcaccatgttgtccaggctggtctcaaacccctggctcaagtgatcctcccaccttagcctcccaaattgctgggattataggcatgagtcatagggcttgaccttataattatatatttttagagctgttttaggttcacatcaaaattaagcagaaggtacagagtccccatagctctgtaccacacatgcacagcctcctctatggtcagcatcccctctggagatgtaaatacagactggatgccccaggtgcattggttacagtcgacccacctgcactgacccatcgcccagactccatagttcacatgagggctcttggttttgtacattctgtgggttcagacagatgcatactgacaagcatctaccattgtcgtatcatacaggactgtttcactgccctgaaattcctctgtgctttgcctattcatccatctctcccccgcttacctctggcaaccacagatctttttactgtctccatagttttgccttttccagaatgtcatgtagtgggaatcatactaaactaaacacactctcatgatccagcagtcatgctctttggtatttatccaagggagctgaacacttatttccaaacaaaaaccttcacactgaggactatagcaattttattcataattgcaaagacttggaagcagccaagatgtccttcagtcggtgaatggataaacaaactggtccctccaaatgacagaatattattcaggactaaaaagaaatgagccatcaagccttgaaaagacatggaagagatttaaatccatattgctgagtgaaaaaagctaatcagaaaagtctttatttttttaatggcagcttgatgtcccattggacaggtacaccactacttattttaaaatcccatttggggatgacttttaaaataagactttgagacaattaatggataactaatctctagctatgaaaggtctactgcactgaagaactttattggtgaatgtaagagttcaagaaacaggaaagaaacacacaaagatgctcaacagtcaaagacatgtttattttggagaataaacctgagaggggcttctgacccatttcagtcaggtgcattctctctcttacagattaaaagtatttatgggttcagagcgagagaacctgtcataggcttggaacatttgtgtgtggcggagaagtttattgcggggttggaatgcctctggttggaggtgaggttatctcgtggctgacatctctccagtcagaggggaggttatcttggggctggcatgtctctggtcggggagaggtttatcttatagttggaatgtttctggtcggagatgtcatttgtggtttatggtcatgctgaccttcaccattaggctgatgccctttggatttaggagatttttgatcaaggtgaacttttaaatggtggtgcttgtccaagatggcgatactcctgctctgtcagtgaatattttaaacgtgtgcataatctctcagatagatcaagctggggcaccaagaaagatcaccataggcctctataggatggattttttaatgttcctttcatttagaaacatgtgctcggcttcccctaaaccctctctcaggatattttacttttgttgatgactcaccccactcaccacatctacttagggccatgatattggagagtcagattctataccgtacatttttttaaatggctgtttatccgtggaacacactggaaacacctgcccatgccttgacgtggacttctagcctctacaccaagataataaatttctgttgtttcagccactcagtgtgtggtaatttattttaaggcagccctagcttaaataaagtactcataactcattcataacaccccatttttttcacatttctgccaagactctaattaagaataaataaagctgtgcaaaataagagcgtaacaaaacaatggtttcatcctcattcctagactcccctcccccagcctagcttctcagtctgcctctggggctcccacctgttgtgagacgcaggggagatgtgatgaggggatcccctggtgctgccatggaaaccacaccaggagtaagggagaggcgtggctgggaacaagggagggaaggcctcagagagagctctggaaagtgtctgggtaaggttgccccaaattccatcctagcacacagtatatgctcaataaatatttatggagcaaattaatgaaattaatgaaattctgcaactttttttttttttgaggtggagtcttgctctgtccccaggctggggcacagtggcatgatctgggctcactgcaacttcctcctcccgggttcaagtgattctcctgcctcaaacacctgaggagctgggactacaggtgcccgccaccacacccggctaatttctgtatttttagtagagacgaggtttcaacatgttggccaggctggtctcgaactcctgacctcaagtgatctgcctgcctcggcctcccaaagtgttgggattacaggcgtgagccactgcgtccagcctgaaattttgcaacatttgtctaaagacttcgaacatggatgattgtggttcctaggtcatgggtttacataagattctacttataaaagtacattaaggtggttaaaaatttgttttaaaacctttattaaaatttcttgtcaaataattgttttgtttaataagtgttcaaagttgtgaaaaagcgtgctaacattgttaacagcacagactctggcccctgcaaacagagcctttctcaagcagcttcccccagctcccctctctggctctctttccctttgtctcctcatcttgtttctgtcaccgtcatccgtgtttgaacttacttggcttatttattcattttgtttgttcactggtttttttgttgttctctgggtgaactggtaaactcctgagcactgagaccttgtctgtgtgttcacctcgtgtttccgggacctgaacagtattgggtcattaccgatgctcaacgtacatgttttgaataaatataggatgtgtcaaaggttatttcaaagatgtatatttcctttcactcaacagtatcacttctagaatataccctgcaggtatgcccaaataaatgccaaatatgatatgcatggcgttattttctgtagcttttctagaccagaagaaaagaatggaaatgacttcattgtgcatagaagggtagctggctaaataaaccttagtatcctcacactttggaagattctacacaataaaagagaatgaagttcttaccgtatagatagagaacaatgcccaggatgaattgtcacatggagaaagacaagtgccaaatggtatacaccatcactttgcagaatgtgcatgagagtgtaattatgctcagtagtttatgaataacccattatgcataataacatgggcataatagattgtgcatgataatatttgcataatatattagaacatttttgcatgcatacgtatgtatgtaaaacttcactctggggcaaaacacaagtaattggcattagaaaaattgccactggaggccgggcgcggtggctcacgcctgtaatcccagcactttgggaagccaaggcgggtggatcacaaggtcaggagttcgagaccagcctgaccaacatagtgaaaccccatctctactaaaatacaaaaattagctgggcgtggtggtgcacacctgtagtcccagatactcaggaggctgaggcaggggaattgcttgaacctgagaggtagaggttgcagtgagcctagatcacgccactgcactccagcctgggagacagagcgagataccatctcaaaaaagaaaagaaaagaaaagaaaaattgcgactggaagggagaagtgaaagaacaaagctcagaggtggaagagagaattctttttgttctgcttagcaatttgtactttctttgaaatgaatacatagatttgcaagagtaactaaaaacaactatttatatgatattaagagttctattagtgtgccattttataaatgtcaccataatcattatcgaatgggctagaggttaacatttataagatatgtgcattaaggtgttccaaaatattataacagggactggaaagaaaaaaacattaataaatataagattatttacaagtttaattcatggaaaaaataagcaaacgttggaaagcaaccagtaaacaattggaaatgaaattttaaaaataccaatcacatttatatctaaaaatatgcactatctattgcaaatctaacaaaatatacagaagatgtgtactttaataaagcacacatcattgctaagagaagttaaataagacttaagtaaatagagacacatgtgatgttcatggattaggagacctgacaatgttaggatggccatgaccccagggtattgtaatcccagtcaaattcccagtgccatattttgtagaaattgacccattgattctagagtctatgtggaatgacaaaagatctacaactggccccccaaaaattaggaaaaccaaaagaaagaacaaaattggaggactttatctgatgtcaagattgtataaagctacaataatcaaggcagtgaggtatcagcacatagagaaacatacatcaatagaacagagtccagacacacatccacggtcaattgattcttgacaaagaccatggaacttgacaggaaatggaaagtcttttcaactaagcattctggaacacatatataacttaatttaagatgggattatagacctaaacattgaaaccttccagaaggaactatagaaaaatatcttcatgatgttggaataggcaaatattaggagacaaaaaaagctcaccattaaacagtcagtaaattgaattacattaaaaaaaatttctgttcatcaaaatattctgttaagacatgaatatgcaagccacatggtgggggattatatttacaatacatatgtctgcaaaaggacttataatcagaatatgaaaaaaatgcctacgtcaataataaagggacaattcaattaaaaatgagcaagaaactcgaattggaactttacaaaagaaaatataggccaggcgtggtagctcacacctataatcccagcactttgggaggccaaggcaggcagatcagctgaggtcaggagttcgagaccaccctggccaacatagaaaaaccccatctctactaaaaacacaaaaattagctgggcatggtggcaggtgcctgtactcccagctactcgggaggctgacgcaggagaattgcttgaactcgagaggcagaagttgtagattgtagtgagccgagatcatgccattgcaccccagcctgggcgacagagcaagactccgtctcaaaaaaaaaaaagaaagaaagaaagaaaatatgcaaatggacaataaacacatgcaaagatgtataagctaattagctgacagagaaacgcaaattaaacccaaaataagataacatttcacaattactaggatggttaaaatacaaaagactgaaatactgaatattggtgagaatgtggagcaactggaattctcacacatcacagatgagggtatataatggcgaaatcattgcagacaaacagtctgagtatttctgagaatatcaactgtataaataacctttgactggctcatttcactcctaggtatttgcctcaaagaagtgaaaacctatgtccataaaaagaattataggccaggcgaagtgactcgcacctgtaatcccagtactttggaaggccaaggtgggaggaatgcttgagcccaggagtttaagaccagcctgggcaacatagcaagaccccatctctacaaaaaatacataaattagtcaggtgtggtggtgcacgcctgtagtcccagctactcaggagactgaggtgggacaatcacttagcttgaggaggttgaggctgcagtgagctgtgatcgcactactgcactccagcctgggtgacagagtgagaccctgtctcaaaaaaaaagaaagaaagtttaggtctgggcatagctgtgcagagagatgctagcctaaggcacccaggcctccttttacctggtaaatgcagggaccccataatctgtgcgtttgaaaacctctgcgtgggtcatctcaggactccctgaatgtgtctgtatccctacgtgttgctctcagtcaatccctaaaccttctctgaggatgtttgaagcccccaacctcccttttcaaacaatacaattagctcagggctatgatatttcaggtacaggaagtggcctatgtcatcctaattctgcactggtatgaggaataaatacggtcgttaatccctggaatatcctgaggaaaacgtattcagtttattgagaagaaaatctaatatatgataaagcagctgtttgaaaccgtatgtgattttctcatcaatctctttcctgggttactgagtgggcacgcatgttctttttttcccagtaattgctattttactgtgacattccggtttaagactttgacatttaaatgataaatgtcgtgtctcgaatctcagcacaaaaacacttttctacggaattgctaatagcagtcttcatttgccaattcccaacctgagctgatcctcacacggctacactgttcatgtaatttgagaaatgactcactatccctgagtcgtgattctctgcaaggcacgactctctaaaggtgccacgagacagagactccctccccgtttccaacaaggcgtcttccacaagggaaataaatgttcacctttcttgtctttcaaatgtcaaagaattgttttttcttacggcaaggaactgtccacaggttaaaatttgttatccattttcttattgtgaagtttaaaatacgggtaaaaaatgtgcatgaagttcattggaacaggtgaatacatgacagtaacaacttcctgcgttaggaaagactagggttcccagaacccccaccccttcccatctacaacccccttcctccctctgctgcccccgtccaccccgccagccccctggacataaccactattctgacttttcttttgtttttctttttttcttgacttggagtctcactctgtcactgaggctggagtgcagtggcacaatctcagctccgcctcccaggttcacaccattctcctgcctcagcctcccgagtagctgggatcacaggcacccaccaccacacctggctaattttttgtatttttagtagagatgagatttcactgtgttggccaggctggtctcaaactcctgacctcaggtgatccgcctgcctcgtcctcccaaagtgctgggattacaggtgtgagccaccatgcctggcctattctgacttttctaataatttattttcgggtctttatcccttcactgcctggctaaaccactgtttatttttatttgtaaaatagtaatctttgtatttgttaaaatgttagtaatgctcgctctattttgttttgtttttcactcccccacatctccgtcttccccacattgatagctggttctgtttggttttaaatccccatctactgtggggatttaaggttttttccttaacaattttaattgcggtaaaatacatgtatcataaaacgtaccatttgagggccaggtgttgtggctcacgcctgtaatcctagcactttgggaggccaaggcgggtggatcacctgaggtcaggagttcgagaacagcctggcaaacatgactactaaaccccgtctctactaaaaatacaaaaattagccaggcatgttggtgcgtgcctgtaatcccagctagtcaggaggctgaggcaagagaatcgcttgaaccccgggtgaggcagaggttgcagtgagctgagatcacgccattgcacttcagcctgggcaacaagagcgaaactccgtctcaaaaaaaaaaaaacaaaacaaaaaacaaaaataactgtagcatttgagccatgttaaaatgcagagttgagtagtattagtctattcccattgttgtgcagccatcaccactgtccatttccagaactttccatcatccaaaactgaaactctgtagcccttaaacaactcctcccagcccctggcagcctccattctactgtttgtatgtatgaatttgatgactcaagacacctcgtctaagtggaaccaggcagtatttgtccttctgtgcctggcttatttcactgagcatcatgtccccaaggttcacccaagctgcagcgtgtgtcagagtttccttccttttgaaggctgagtaatattcccccgaatagatggaccacactttgttacccactcccctgtcaatggacctttgggttgcttccgcgtcttccttctgtgaacacgtgactgcccacagcttcattcctaggccatgcaggagtgaacggccgatacagagatattaatcaatatcttcataatgagggcaggaataaaggagaagataagtgaatgatgagaggatgtctcagacacctgcacagctgactagaaaactaagatttctggccaggcatggtggctcacgcttgtaatactagcactttgggagaccaaggagggaggatcacttgagcccaggagtttgaaaccagcttgggcaacacagcaagaccctatctctacaaaaaataaaaaattagccagatgtggtggcacatgcctgtagtcccagctactcaggaggctgaggcaggagggtcacttgagcctggggaggttgaggttgcagtgagccatgatcgtgcccctgcactccagcctgggcgacagagtgagaccctgtctcaaaaaggaaaacgaaaagaaagaaagaaaaagaaatcgatttctgagcctgtagaggctgagcacaatctggtttttcccttccataaagtccttatccacggacgtgatttaacacacataaatcacagtcaccggcagtggataaaaacctcggcctcaagtcctcgtctctgcctttctatccctccagctgggccaatttctggtccattatttcagggctcaatcccagcccctccccagctctcatggccatgggaaattgaggtaagctcagactgctgtcatggaaaccagagtaattgggagaaaaggcagagcgctgaagaatgctgtacaacgttattagtattcgtatatgccagatcttatacaaatatatgaaaatgctatcatttgttgtaaaaaaaattatagttagaaataaatgcacataaagatgctcacacaaacaacaactctggaaggacacacaagaaaattattaattgaggccgcgcgtggtggctcacacctgtaatcccagcattttgggaggttgaagagggtgggtcacctaaggtcaggagttggagaccagcctgaccaacacggtgaaacctggtctctgctaaaaatacaaaattagctgggcgtgatggtgcatgtctgttatcccagctacttgggaggctgaggcaggagaatcgcatgaacccaggaggcagaggttgcaatgagctgagattgcaccattgtactccagcctgggtgatagagcaaggttctgtctcaaaaaaaaaaaaaaaaaaaagtgactacaaggtttgaactaactcaagttagaggcctactttaaaccttcagccaaaaatccgttaaaaatacacaagcagttagtatttataagagcttctactagaaaattcttccaaaagatcttcgcagaggcagaaaacaaataacaattgagagacagggttgtaagggggtgctatggtctgaatgtaagtacctcctcccaccgaattcctctattgcaaccctaacccacaaggtggaggtattaggaggtgggggccccaaggaggtgatcagggcatgagcgccttcgccccccgaccattcgaagatacagtgagaagaggccacctgtgcacctggaaacgggccttcagcagacactgcccctgctggtgccttaaacttgaacttctggcctccagaaccatgagaaatcaatgtctgttgtttataagccactcggtctatggtattttgttgtagcagcctgactgggctaaaacacagggtttaaatactagggcaatgaccgataaacaacaatcacgttcataacaccctgaaaatgaacacttgcaaataacgtgagaaggaacgaattttgctttatcacacgatgaactataacatttcacaagtcaacaaaaacgagaaaagtgcacacagagatgaacgggcgaggcttctcacgaggaatgcagacaggaaaaccttctgtgcttttcccagtaatctgagaaattcatgggaaacgcacacatgaaatccaattttctcctaatggatggacagacagcagaaaggatggagcaattaggcattgccatggaaacctgattgagaaggagaaggggaggagctgagaagaggggccgagagcacccctcaccctcaggctctgcagccagacagtgaagggccagccaggctgcagggtatatgcaggtgtatttgtgggtggataattaaaatgagggacaggccgggtgaggtggctcacacctgtaatccccgcactttgggaggccgaggtgggaggattgcttgaggctgggagtttgagagcagcctgggcaacacagggagatctgtgtctccaaaaataattagccaggtgtggtggtgtgcacctgtggtcccagctactcaggaggctgaggcgagaggattgcttgagcccgggagattgaggctgcagtgagccataactgcacaaatgcactccagcctgggcaacagagtgagaccttgtcaaaaaaaaaaaaaagagcagaggtggcttctcaatttgggagaacaatctcttctacctcgttgggtcactgcgagaactggatgatgtttgtaaagcatgtggcccgtttctggcgtgcatgtgctgggatttccacagggacaggtagaggtgcagctaggagaatccccaggatgtgggggaagctgggcagagcacagatccctggggtttaccccagttgaatgaagatctcttgattggaaaactgcacttcctctcacaatatgacagaggtccgtgttagcctgctatatttatttgtgtgtatttgtgtcctttttttttttactatttattatttgctgaaatattctttttatttattattattattattattattattattattattattttgagacagagtctaactcttgtcacccaggctggagtgcagtggtacaatcttggctcactgcaacctccgcctcctgggttcaagcgattctcctgcctcagcctctagagtagctgggattacaggtgcccaccaccacgcccagctaattttgtattttagtagagatggggtttcatcgtgttggccaggctagtctggaactcctgacctcaggtgatccaccccccttggcctcccaaagtgctgggattacaggcatgagccaccacacgtggcctattctttttaaaaacaattttttgttctcctggtaactgtggttctccattcatcccagtgtgttccctgaaagcagagatccttctccaaattcatgttgaagtcctaaaccccagtacctcagaatgagattgtattttgagatgggcctttacagaggtaattaaggttaaatgatattatcagggtaggccctaatccaatatggctggtgtccttatagaagaggagattaggacacagacacacacagggggatgaccacgtgaggagaggagggaagacggccaaatacgagccaagcagagacaccttagcagaaaccaaccctgcccacaccttgatgttgacctgcagcctccagaactgtgaaaattttctgttacatgagccacccagtctgtggtactttattatggctgccagagcagactaagacagtcacccatttaaggggaaaaaaaaggaagttcaggttgaagaaacaggaaacattctgaaaacatgcatataatcaacaagaaaacaaagaattatttagcatattagaaatggaaaaaaagtccgggcgcgatggctcatgcaggtaatcccagcacttcgggaggctgaggcaggcagatcacctgaggtcaggagttcgagaccagcctggccaatatggtgcatccccgtctagaatatgaagcaggcagaagaacgtgaaaaactagactggcttagcctcccagcccacatctttctcccatgctggatgctccctgccattaaacatcagactccaagttcttcagttttgggactcggactggctctccttgctcctcagcttgcagatggcctattgtgggaccttgtgatcatgtgagttaatatttaataaactccctaatatatcctatcagttctgtccctctagagaacactgactaatacacccagacttgcagaatcaccctcaccttcaacaccagcattctggcctgggggctggacatgcaggctggcctgttcctttgcaatcatcccagcatcacagaggccactgtggctgcatggacctatcactcctgacctgttgttactccctctcctcatcttccctgtcctgccccttgagacggctccacttcctgaactccccaaatccaacttccacattccatcttcattgctaacaccctggaccagggcactgagatctctaccctacaagaccacggcaccctcctcatggggctccccacctccacaccaggccctgggtcctccaccttcccaacaggagccagagggagagctttaagtcataaaacagatgatgttgcctctccttgccattcggacttacaactttccagtggcctccaatgaacctacaatgaaatccaaaatccccagcataagagtatgtaggagaaggaatttgaaaacatctagaaaaatcgcatgcacatgttccctctggcccagaggtgattggtcaatacttatctaaactgcaaacacacataaccttgaattaaatactgcaattaaattctcagagttcatccagaagtcagagcaagattcgccaacataacatctgtgtaataagactgttcagtgtaccagactattattattattgtaacagaaactcatcaggaaacgtgtccatgaaattgtcagaaatctgcaaatgcaatgttctatggacataaataaggatgtgtaatgtctttgtgtattgatgatataaggtcgtcaccaagatgtggcgttaagtgataaaagcgaagtagcacacgatgcaatcctgggtttcttgctgtgtttttaaaagaggagaagggagtaaggctaagggtatatgctggtgctgatatatgtacataacagctctgcaaggaaacagaactggaaattggatttgtcgctagacttttgtgcagacttttcttctaaagaacctagtactcaactcagccattgtgagggcaaaagcagtcacagacaattcataatgaatgtgcttgactgtgcccaataaaactttatttacaaagatctgtagagccagatgtggcctgtggaaaggatagttttctgatccctggtccagagaatgaaaactcgggatggggaggatagatgaggatcaaaatggaaaaagaaatgtatcatcccaaaatcaatgtacaaaaatgagtagcatttctatgcaccagtaacattctagatgagagctaaatcaagaacacaatcccatttaccatggccacaccaaaaaaaaaaaatacctataagtatttctaaccaaggaggtgaaagacctctacaaaaacctctacaaaaaaaacaaaacagtgctgaaagaaatcagtgataacacaagtaaatggaaaaccattccatgcccatggttaggaagaatcaatattttttaagtggccatacttctcaaaacaattttacagattcaacgctgttcccaccaaactatcaacatcatttttcgcataattagaaaaaactattttaaaattcatatggaaccaaaaaagagcctgaatagccaaaacgatctgaagcaaaaagaacatagctggaggcatcgcattacccaactttaaactatactacaagattagagtaaccaaaacaccatggtactggtacaaaaatagacacatagaccacaggacagaatagagagcatggaaataaatctacacacctacagccatctgctcttcgacaaagtcgacagaaatgagcaatgagaaaaggacttcttattcagtaaatggtgctgggataactggctagccatatacagaagattgaaacaagacacctacctatcaccatatacaaaaactaactccagatggattcaaggcttaaatgtaaaatctcaaaccataaaaaatcctaaaaggaaataccattcttgatattggcctcagcgaagaatttacagctaagtcctcaaaagcaattgcaacaaaaaaacaaactgacaagtggacctaattaaactgaaaagcttctgcacaacaagagaaactatcaaggcagtaaacagacaacctacagaatgggagaaaacattaaataactgcgcatctgacaaaggtctagtacccagaatctttaaggaatttaagcaaatcaacaagcaaaaccaaaataatcccattaaaaagtgggtaaaggacatgaatacacacttgtcaatagaggacattcaagtggccaacaaacaaaagaaaaaatagcatcactaatcatcagagaaatgtaaatcaaaaccacaatgggataccatctcacaccagtcagaatagctgtttttaaaaagttaaaaaataacagatgctggtgaggttgtggagaaaaggggacagttatacactgctgggagtataaattagtccagtcactggagatttatcaaagtactaagagttgaactaccatttgaccaagcaatcccaatattggatataaatccaaaagaaaataaattattctaccaaaaagacacatgcacccaaatgttcatcgcagcactattcacaatagcaaaaaaggactcactattcacgatagcaaaaatggtgcctatcaatagtggattgtggtggccaggcgcagtggctcacacctataatcccagcactttgggaggctcaggcgggtggatcacaaggtcaggagttcgagaccagcctggccaacatagtgaaaccctgtctctactaaaaatacaaaaattagctgggcatggtggtgtgcacctgtagtccaagctactcaggagtctgaggcaggagaatcaggtgaacctgggagacggaggttatgctgagctgagattgtgccactgcactccagcctgggcaacagagtaagactccatctcaaaaaaaaaaaaaagaacatgtggtacatatacaccatggaatactatacagccatgaaaaagaatgaaattttgtcctttgcagcaacatggttgcagctggaggccttgagctgctggcccatcacacaagcccaacctggcctacctggtgcccattgatccaacctgaatcctcttgagagcttttacctgttgtgatgagggaggaagtctcaggattggccatggaagctgcagctgaagcaagggaggagaagggccggcagaatagtccccaaagtatatcgttaagtaaaaagcaggccccaaagaggatatatgagatgctctcattggttgtttaaaataagaggggaagattatggtttggatatagatgactgaatagatacatagatagatagatgatcaatagatggatatatatatatatggcagataggtagataacacagatgaaagattgatagatggatagatatatatgtaatagataagatagatgattgatagatacttgataaatagctagatagatgacagatagatggatagataagatatatagatgggtgactgatggatgaatagatatacacacaatagatagatgatatgtactgatagacaatagattaattatagaaagaaagaaagaaaaaagagatagggagagagaaggaaggaagagaggaacgaaaaaaggaagggaaggaggaaggaagagagggaggcagaaaagagaaggaaaatgtgtgaaatgacaaaagggagaagtaagaggatgagggatcaaggctgagagaaaggttcttctctgtatcacctttggaactgtttgagcatgtattacttctccaaaaaacaaattaagatatgaagtccacaatcaggattgaacaaaaaatgctagccacgtaaataccgtcctatcagaatctgccctcacactttccaccataaccaatttcaagtggattggaaatgaacaccaatgtgacctctgtacccaggctttccaaaatataacagcagacttagatcacacggaggacatgatgacacaagtagcagcaagcagcttttgaaatcttcctgatatcacacctctgttaagtaatttgcaaatattatattgatcagtctcaaaaaagggagttgtgtttgcaataacagcagcgttaactgaccacttactatgtgccaggcactctcgtgacttatatttttctataaatctatattttaatttatatataattaaatactttacatataattatattttttaaatttatataaaattctttgaatcctcacacaacacctgtgtgagaggaactgtttttatcttcaacacacagatttggaaactgatattaagggaattgcataagtcaccagctgagaggtggaaaagccaagatgcacactcaggctgtgtgactacctcctctccttccccctcctcaccctgtccatcaccacttcccgttcgttccacttccagaacactccaaatccatttatctcaatggccaaaactgacaccagaccctgtctctctccctccaatgaccccaaagcaaccgcttcaaggatctctctaattccatgctagccactttgctattttcttcatgttacttcccacatgtgagcaatgggataaaaataactactattgagtgtgtgtgtgtgtgtgtgtgtgcgtgttttcaatgaatgaagcagtaaaccaaaaacaagattctaagcccccaaccatctgaatggactcctcccatccacagggcattctaaagttaacctgaaaaaagtcgtttaggccatgatagtaaagaggaaccaaacatgcctcattctaccctcctctcttttgaaattactcatagaacaagcttcttaagtctgataacaaaactttgcaatctattttctgaagcctgctacctggaggcttcatctgcatgataaaactttagtctccataacccattattataacccagacattcctttctattgataataactccttcaaccaattgccaatcagaaaacctttaaatctacttatgacctggcagcacccacctcgagctctcccacctctttggattaaaccaatgtataccttgtattgattgatgtctcacatctccttaacatgtataaaaccaagctgtacctcaaccaccttgggcacacgtcgtcagtacttcctgaggctgtcatgggtgcgtccttaaccttggcaaaataaacttcctaaattgattgagacctgtctcagatactctttcattcacaaatctgtacatattgtcatgggagcatctggcagtagtcagtgctttatggtcattggttattaagttcaatcatgtctcacataacgactgcatatatgacggtggtcccataagattatcataccacagatttaccatacattttctatgtttaggtacactgatacttaccattgtgttacagttgcttacagtattcactacagtagcttgctgtccaggtttatactctcagaccagccctgtaccttgtagcccaggtatgtagcaggctctggcatccaggctggcgtaagtgcactccaggatgttccacaataaagaactcacctaacgaggcatttctcagaatacatttctgtctttagtgatgcatgacagtacatgcaccataataaagaaatattaataggctgggtgcagtggctcgcgcctgtcatcccagcactttgggaggccgaggtgggcagactacgtgaggtcgggagttcaagaccagcctgaccaacatggagaaaccccgtctctactaaaaatacaaaattagccaggcgtggtggcacgtacctgtaatcccagctactcaggaggctgaggcaggagaattgcttgaacctgggagatggaggttgagatgatcatgccattgcactccagcctgggcgacaagagagagactctgtctcaaaaagaaaagaaaagaaaagaaaagaaaagaaaagaaaagaaatattaatataagccatgaccaattcacactgtttatatagtaacataaatatcagtacatattcagtgctcaagccgccatcatctctcccctggatggcagcagctgcagcctctcactgactctctgactccacgccagcctctctctcatccctcctccactcaggagccagaaggagaattgacaacactcacagaccacatcacctccacaatcaagactcagtgtcttctcagaagagcactattcacatttcttatcttggttctggaaggtcctgcctttctccccttgccttcctctcccaccccattcctgccactggccctgaactcaccctacccagcccacctcagcctattccatttccttctcacctctgggcatcggcacctgctggctccccaaacatctctatggcaggctccttctaaccagtcggacctcagccctggtgtcactgaccacagatggtgttcccagaccctcctgactgacctctgacacacatctgtgctacctcctgtagagagtccattctttttggagatcagttctcgtgtctgttaagtcgtgtatttgttgtccaccttctccacataaattgtagcttcttgaggtccaatgtctcatctttcttatctggggcacataggtggtactaaatacattactgttcatctggtattgttttatgtaactttctggttaatgactgctttacccattcattctaaccatcagcaaggaaggagttgttcacatttatgatctcagtggctacaatagctactggatggatgaatgcatgacagatggatgaatgcatgacagatggatgaatcatggaaggatggttgattggaaggatgtctgggtgggctgatgactagttagataaatgcacaaatggatggtttgttgaactgatggttgcgtggatgtatgtatgttatggattgatgggtgatcaatgggtagacgaatgaatggatggctggttgaattgatggttgcgtggaggtatgtatgttatggatggatgggtgctcaatggatagatgaatgaatggatggtttgctgaactgatggttgtgtggatgtatgtgtgttatggatggatgggtgatcaatggatagatgaatgaatggatggctggttgaattgatggttgcgtggaagtatgtatgttatggatggatgggtgatcaatggatagatgaatgaatggatggtttgctgaattgatggttgtgtggatgtatgtgtgttatggatggatgagtgatcaatggatagatgaatgaatgatggctggttgaattgatggttgtgtggatggatgatatatcaatgaatggatggctcgttggatatatggacaggtgcatgggtattagatggatgcataaattgctgggtggatggatttgtggatggatcaaaacgatgggtggataaatggatgtatgaatagatggataggttcctaatgagaaatgacaatgtctgtgttactcacactaacagaatggaatgtgaattgaaacctgatgatttccttgagagtcagaagaggatttcaaacaccctacccaagacatttagcactgacaaaatccatgtggtgacctctgctggggtccccagattgcccctccacagctgcgctgctcttgcttccctccaccaccctattctgcccaaggaggctcccacctgccatagggatgggcccccagatccactgttgccttggaggtgaggcaggaaagagctgaggaaggggcagagagagccgggagactggaatgttcctgactctgcagtcagtgtgtggcttcagtgtgaaggcccaggcacacagaggccagagaacagaaatattttgggaacaaatacgtgaatagaagtgactgactccacctcactgagcctatgcttaaccttctgaaatggggaaagcaatcatgtctagctcattgagtcatttgagaattaaatcagagggtgcttataaggagctcagcccctcctgacaggagacaggtgtcactctaattgagccttagagatccctgcaccaggatcccctggtgtggagggatggctgctataaatgcaggtgcccaggcccatgccagacctgctgaaggaaagtgcttgcctaagaaaacctaccctccctgccacttgctgctttgttcactctctatatatattttattttcaaatatcatgcagagtttgttttctaaaaaaacattaaatgtcacagctcatttaccaatatgctataaaatgcagttataaccatgcagaggcaagagttgcagaaaaaaaatgcaattgtaaatcattaacatgaaacaataatagaatgaataaaaatgtaaattttgtaatatttcctttcatccctcacaggttcacaaaatattcagtttcagcaacttttaaaaaattaataggctttatttttaaagcaattttaagtttatggaaaaattaagcacaaactacagagagttctcatacggcccacaccaacccaacttccctattatcagcgtcgtgttttggggtggtacatttcttataatcgactaaccaacattgagacgttagtattgactcaagtccacctttctcagtatttttcttccacttatcagaatctgagctctctgtatttgtttctttcgaattagtctcactgtactgcaacaaaggtccctaaagcagtggcctatccatctcgtctacctgcatccccatcccctgggaggagcagggcacacaaggaaacatgaataggtgcccagaggtgcaaagggtcgtttagaaaaagcgcagattcatggaggtgtgaatgaccaagaaatacagatgatggccacaagccaagagaccaaggaagattgcgacccttgtccagaaaatgaggtgtcaggtgtgggagaaagggctggcctcccaaacacaggtggtaggagacttgcttgcctgaaccagaacaggcatagggaccagaatgaccagcggattaattagagaaatgtctttgagccatactatgttcctcgtcctagactaaattacttttagtcctagactaaattactctgactcacttttcctcttaattatatcaacaacctttgaagtgggcataattaataccctgattttacaggtaggaaaactgaggcacagagaggtgaagtgacttgcccaagaatgcaccgctgatcactggaagaaccagaaaatgggaacccaaccagctcacaggtggagaggagggcccccttggactgacctttaaaaatatatagtcattacatgttctgagaaacagccccaggcaatgtcctggaatctgattgctaagagactccaagtggcctggattgtacccaacccagggcctttgcacctgctgttcccttccccagacatttcacttctcatcattcaggtctcagctccaatatccttatctcatttccagagcatcctgtctaaaagatcacgttcttttattttaaattcttcacagagcaaattcctctctgaaatcatgtctttgttaattaatgtattgtctctttcttccctgagttcaggtgcttgtttgtatttggtcaggctctgcctttatgcctaaccttagacctgtctcccaacctcgttctgcacccctgaatgtttgtgacttcttcatcttctcactgtactgccctgcagaagagacaaataacacttacttgtcacatgaaataatgaaaagaacaaaagtgaaatctgagaatagactttaaaaaaaaatgacaaccaaaagattagagtcatggagattctcttctcctgagaaaataaatactgcttttgctcaaatccttacccttctctggttcctggagaaattgtctgtacaatatcaggttagtgagagaaggtttcctggagcccctaaaataaggcagtgtgcaacagccagactccaagatggtcccctctgaccctagccaacaggtattccttcctttgtggttccctcccacattgaagggggctgtgcaaccagtaagatatggcagacatggctgtgtgactcctgaggctgggttctatgagatcttgtggcttctgccttgctttctcttgggtcacctcctctaagggaagccggctaccatgatgtgaggatgttcaagcagtcttatggagaaaccaaggcctcctgccaacagccagagctgattcatcagccttgtatgtgggccatcctggtagtggattctttagccctagcccagcttttaaatggctgtagccctggtccacatcctaaccacaatgttataagagaccctgagagagaaccacccagctaactcacttccaaattcctgatccacagaaactgagatgataaatgtctgttgttgttttgagccactaagttttgaggtggtttgttacacagcagtgggtaactaatacatcaagctgtcagtaaccaccaacattgttcttccaagcccacatagttatcagagtcagaaaaaaatcctctcaatggcctatgacatgacctcatgagagctggctcctgctacgtctctcctttgcttcatactttttcccgcagagtggctgttgatttcagccactatgactctccagcacatttgctcaggcctgctccctctgggggatttggttttgttgtgctctcatcctggagtccttcctgcagtgagcctcatttccagttctctcactccttcagcgcttcctgttcaaatgctctctccccagagactttcctgacctcccttcctaaaatagctgcctccctccaccttctctaccatctcaccctgccttgttcttcttcctaatacctgacacagcatacatttatttttgtttattacctgtcttctcttattagattgtaagctccgaaaggacttggcaatcacctattgggtttcctgctgatgcacaaccacctgagcagtgtggggcaccctcaaaaatgattggttgacactatggaaaacagtatagagattccctaaagaactaaaagcaggacttccattctgtccagcaatcccactactgggtatctacacaaaggaaaagaagtcattacatgaaaaagacacttgcacatatatgtttatagcagcacaattcacaattgcaaagacagggaaccaacctaagtacccattgaccaaagagtggataaggaaaatgtggtatagacacaccatggaatactactcagccataaaaagaaacaaaatgatgtcttttgcaacaacttgtatggagctggaagccattattctaaatgtagtaattgaagaatggaaaactaaatatcgtatgttctcacttgtaagtgggagctaagctatgaggattgaaaggcataagaatgatatcatggactttggggacgcagagaaaggtcgggaaggaggtgagggataaaagactacatgttgggtacagtgcagtcaatgtgccacactgtacattttgatgggtgcaccaaaatctcagcaatcaccaccaaagaacttatccatgtagccaaaatccacctgtactccaaaaactattgaaatgtaaaaacaaaacaaaaacaaaaacaaaaaaagcacaatacttaatgattggttaagtgtggcatggtggctcatgcctgtaatcccaactactcaggatgttgaggcaggaggatcacttgagcccaggagtgtgaggctgcagtgagccattatcacatcactgcactccaccctgggtgacagaacgagaccttttctcaaaaaattaaaaaaatatattggtggccgggcgcgatgggtcaggcctgtaatcccagcactttgggaggccaaggcaggcggatcatgaggtcaggagatcaagaccatcctggctaacgcggtgaaaccccgtctctactaaaaatacaaaaaaagagaaaaattagccgggcgtggtggcgggtgcctgaagtcccagctactcaggaggctgaggcaggagaatggcatgaacccgggaggcagagcttgcagtgagccgagatcgcaccactgcactctagcctgggtgacagagcaagactccacctcaaaaaaaaaaaaaaaaaaaaaaaaaaaaaaaaatatatatatatatatatatatatatatatatatatatatatatatgtaatgttgaagattaaaaatggccaaaaatcacttgatgctccagaagggtagaagggtgtctgtctcccatgtttcctggctctggcctggctctgcaactttttttttttgcaacggaacgtggtagaaacgatagcatgtgcctgccgccgtgaggcccatgaagccttgcagctttcctttccacactcttggaatgctgagaccacagtgctgtgaggaagcctcgcctcgttcactggcccaggaagaggggagtccacatggaggggaacccagaccctggtggagagtccacacaattgctaaatatataagggaaggcatctcatgttcctcccaccccaccccatcctccagctgaatgaggccacacacgtgggcccaggcaaagacagcatggaaccaccagacaacccatgtaaaaaggaagcacactgattttctgtatgctctcaacactcctgacaccaaatatgtgggagattctctcacaccatccaatgctccacttgtcagcagacatggactgggtgtcccacaagttagctcaattatgacactgagtgcccaaaattagtgcagactccagtgattaagggctcaattccacaagactgtccccacccagcttcaaatacccatcataactccccggttgtgacctgtgcttctgacaaagcagctgtaagctgggagttccaataagaacacatggacacagggaggggaacaacggacaccagagcctatctgggggtagcaggcaaggcgggggagagcatcaggacgaatacctaatgcatgtggggcttaaaacctagatgacgggttgataggtgcagcaaaccaccatggcacatgtatccctgaacttaaagcaaaataaaacataaaaaattacaactacctccaccaaaaaaaaactgggggtttccacggccccctcctcaggtttgataatttgctagaacggctcacagaactcagggaaacactttccttactattaatggtccataataaaggctgcaactcaggaacagcccaatggaagatgctgaaggaaaggtgtgcagagagggtgcggcgtttccctgcctcatcaggtgtaccacccgtgttcacctacctgaaaactccccagatcctgtttaggtttttatggagattccattatgtaggcatggttgattaaatcattgcccattggtgatcaattcaacctccagcccttttgccctccctggaggtcaggagttggggctacaaattccaatcctctaatcagatggttggttcccctggcaaccagcccccatcctttggtgtttttcaaaagctacttcattaacataaacttagatataagtgaaataggatttgttatgaataatagaaagacactcctctcacctctatcactcccaggaaattacaagggttttgaagaaacgtgggatgaagacatttcttatcataccatgatagcataccatggaaggtgagaaacaatgagttgttttatatgtcactgcattttgggggctgcttgttacacagcaatagataactgatacattccacgagtaagtagctgtctgacagaccttccttcatctaccctcagcccctccaatccatctccacactgaagccaggacaatgttggaaaatacccatgctggtgtcactgcccagctcactgggaacaatgcaaaggcacctattgctttggggataaagagcaagagccatagatgatgaaccctttcctattccagcatctcctactgtgctgagcctcatcatcctcccctctaccttccagaacttctgggatgtggccagttccctaagaccttcgtatgtcctgccactgtggggtacttgaacacgctatttgatatggtttggttctgtgtccctacccaagtctcatctcaaattgtagtctccatgtgtcaaggccaaaaccaggtggtgagaatcggaacataagggtggtttcctccatgctgttctcgtgatagtgagtgagtttcatgagatctgatggttttataagcacctggcatttcccctgcttgtactcactccatcctgctgccctgtgaagcggtgcctgcttcttctttgcctgccaccatgattgtaagtttcctgaggcctccccagcactgtggaactgtgagtcaattaaacctctttcctttataaattacccaatctcaggcagttctttacagcagtgtgagaacggactaatagagtattcctctgcctggaatgctctctccccactcccacagctaggcaatgccaacacaaccttgagacaccagtttcagtatcacctccacaggaaagcacttctgtaatgctgacatcttatgtaacaatggtccacacacaaatatatttttaatttcacgcacatacacatgcacacatgtacacacatagtgagactccaaaacaaacaaaactctcttcattctaacacatccacgagtggaacttctcagtgagcatttattgagcaacaaccagcttcaagacaccacgaagagtccttaggtccttattacttcttctgaaaataatgttataaagtgatcagttctgaaatggtagaggaaaatctagttaaaaacagaatgtagtcgtagatttgtcaaacagatggttagtgttaaatattttttggacagggttgcctccaacatgttgtctgtgctgtgctgtatccaagaaatccttcccttcctcaattacagggatgcgtgtcctgcttggaatccagcctggcctttggctcaatagaaactccacagacagcaggagagctgaggctccactgtggccatgcagccttgtgtgaaaattctaacggcttctcctcccttggaaatgtttccaccatctgtttccccatacccaggggccaggatgggtgaggtgctcagatcagggccaaaatctaaggaggcagggtgcaaacatcaagtaatcgaggtaattcatattttaatgtaatgtttatttaacatttctgaattaatgcaaaaaaatagacaatgcagaaaataccaacattttaactaaagatgggatctgatgcagttggcattaggaaaagggagggatgtaagtctcgcaaaatactgccttaaaatactatttataggccaggcgtggtggctcacgcctgtaatcccagcactttgggaggctgaggcaggtggatcacctgaggtcaggagttcgagaccagcctggccaacatggtgaaccctgtctttattaaaaatacaaaaattagccaggcatggtggcgggcacctgtaatcccagctactcaggaggctggggcaggagaattacttgaacccaggagactgaggttgcagtgagccatgattcagacactgcactctagcctgggtgacagagagagactctgtctcagaaagaatatatatatatatatatatatatatacacacacacacacacacacacacatacatatatatacacacatatatatacacatacatatatatacacacatatatacatatatacacacatacatatatatatacacatacatatatatatatatatatatatatatatatatatatatatatatatatatacacacacactatctggaatattgaggttttccactgccctttaaattttgcacctgaggccaatgcctcacttgcctgcccctggccatgccgacaccatgtgaattgctcttgggtctcctctccctctccacggccaccaccctagtgttttctattgtatctggcttgaacaaccacagccagctcctaaccatcccctccacgccccagtcttgtccaactcatgaaatgtcactaccacttaacaagccactcaagaccaaattgaggattcattcttgcttcactcctttcctctgaagcctgagtcccacccacctgcaagtcctatcaattccaccttcatctcctactgtctagaaatcgctagacatcaccccctcttccccgtcccacgccatcacctgcggctcagattatcgcaactgactgcatggattttctcagctcctttccgtcctctgcccagactgtcccggaatatggacagattgcactgtgggaatgccatatcagatgcttcggtgctaaagataactgagtctcaccatgataatgttattcgcttgccaagtctttctagttcattcaaagagacgttcctcgtaggtgctggtgtgccttcaacatttccgtcacacttgctaattactttttaaacaaaggagagctttgctcagatcattggcaggcgatggcatctaacccagggtttccagtctcagcactgtggacattttgggctgaataattgtttggtgggtgggcaggagggctgtcttctgcactgtaagctgataagcagcacccctggtctctaccccctggatggcaggagcaaggccctcttccccacgtgtgacaactaaagacatctccagacacttccagatgtccccaagtagacaaagccacccctgtttgagaaccactggtttaggcacacttgtgcatgttgttgttgttgctgttgctgttttttatcattgttctttcttttactctgtcttccacttaagggaggtgacgctggctttccatgcatattcatgatatcaaaactttaaaatgattctcactcgggtgtttaaagttaatgttataggccaagtgcagtggctcatgcctgtaatcccagcacttcgggaggccgaggcaggcggatcatttgaggtcaagaccagcctggccaacatggtgaaaccctgtctctaccaaaaatacaaaaattaggtgggcctggtggcacacacttgtagttccagctactcaggagactgaggcaggagaatcacctgaacccgagaggcggaggttgcagtgagctgagatcacaccactgcactccaacctgggcaatagactaagactttgtctcaaataaataaacaaataaataaaaataaaagtttatgttatagaacaacggtaaatagcacctcatggcctagttcttaacacagatggggcaaaatttctgaaaagtgaacagacaggtaacatctatcccactgatcacttctcccattaaatgtcaagtaaactttctaaattgcaaatctgaccatgtcactctgctattctaaaccctgctgccctctggaaaaagtttttttttaagcatacttaattcttattctgaagcacatttaaaagaaagagagaattgaaaatgaaaaattttgcttaattctcagtatactcagagctgcaaaaatctactggtttcttgggaagagcataaaatattcataaagcctataattatgtctttggtccctttatctaagagcttccttccgtggtaagcaaagcttacaggcattttcccacctagaatcgttttattgtaagcacccatctttgaattacgagtgataaatatgacatctcagaaatcaccagtaatatatttgaggtcaaccacctaaaggagccttcacctagaaattcccaaactaacagctctttatgacgtatagagcctatctataatttcccattcaagcttgtgttcggattgggccaaatatctgcaccacttgtagctagatgtggccatgcaaccaaggtctggccaataggatgaaagcacatgtatggagtgtggactaagagaagccttaaagggaatattgggggtggaatctttctttgcctcacctctcttcctcttagctagaaggcagaaatgctgcctgaattcagccagctctctagacagtgaggtagaagccacctggtgaagaattcagaataacaagacagaaggagcctaggtcctgtgttcattagctccagctgccataacaaaatcacacagactgagtggcttaaacaacaaaaatgtattttcttacagttctggaggctgcaagtccaaaatcatggtgctggcaaattctgttcctggtgaggactctcttcctggcttgcagatggccaccttcttgctgtgtcctcacatggcagaggtggtggggtaggggaagagacctgaactggtgtcccttttcttatgaagataccggttatattgacttaaaagcccacccttatgaagcttatataatcttaattacctctctaaaagcactgtctccaaatacagtcacattgggggttagagcttcaatgtaaattttggtcaaggagcaccattgaggtcatagcagcctctaacagcatagaaccctgaattagactaagatttctgctacacaagagcaagggatgattaaatcccattcagtaattaggatcacctctcaccgactcacattcacacacactctaagacacacaactcccagccacatgccgagcatggtaaccccatttcctactttaacctttgggggagcctgggaggtgggaatcattcttatcccctgtccaaagtggagaaatggaggtcctgaaagagcaactctcttggcagggttggagagtgagtctgtgctgtcaaatgcctcatgtgtgcatttctgacaagatacagagtaatctgagggtggaggaggcgtgaaggtgaatggcaacctagacaaagaactgggaagagatcgacggaaatctgttcctaaaagccccatgcgtatgtttattgcagcactattcacaacagcaaagacatggaatccatgtaaatgcccatcaatggtagactagataaagaaaatgtggtacctatataacatggaatactacacagccacaaaaaagaaggaaaacatgtcctttgctgtaacatgaagggagctggaggccattatccttagcaaattaatgtaggaacagaaagtcaaatactgcaggttctcacttattagggggagctaaacaacaagaacccatagatcccaggaggggcagacctgagggtggagggtgggaggagggagaggatcagaaaagatacctatcaggtactaggcttactacccgggtgacaaagttatctgtacaccgaacccctgagacacgcactttacctatataacaaacctccgcatgtatccctgaacctaaaataaattaaaaaaaaaaaaaaagaaagaaagaaaagaaaaagacccacaagccattcttgctgctggagtcttctggagtttgggttgttgttgttgttgttgttgtcgtattttgttaaaacattcctgttcttctgaaaggatacctggaggctttatctggattcctagggtcctctatccacaaaaagtcagtaaagccacgtctctaattttgggaaaatgtgggtgtgtgtcctaagaccctcatggtgggtggaataatttgctatagggcaagttggagagtgaccaaggatgcctcaaataatgtctcccttttcattacgggggagtgcctttcagaattacacagcaagggtgaattatacgttgactcgtcatctgtgacaaatttcatgcagctcaaggctatcaacagcagctcccttgccaacagcttgcagcagctgccgctgatcaaggcagtcagctcgatccccgtagccttccgtgaaggaccacgggctggtcagaagcagtctgacaggtcacagagccagcccagctgttggggggattagctgtaaggaaagctgatcctatgacacatgctttaggtatgtccgcccctgggaaacgtgaccttcaaggtttgcgttatagaactttattcgcttcaaaagatggagaacacttttgttttctgagtccctggagaatcatgatgcagacagctttggaggtacccaaagaaatggaacacagaatcccaattacatataggccgcacacatgataaacaactgctggtttgggaattgctgggcgaagcttcctttcggcagtttgctcagaatatattgctgatgatttctgagatgctcaattcatcattcacaattgctttgcagtaaaatgcttgcagaagggaaaatagctgtgaacgctgctccccaaggaggaaagcctataactgctggagccaaagatgtcatcgcaggttttatcagtatttcattttcttcccatgaaaccgataagcattcgaagccctgagtgtggtgagaattaagcaagatttgcctctttctgattctttccacaaggtagtgggaatttgaaatgggagaatgatgttgtcctatctgttgtgtggaaagattaccttggctttgcttgtgagaagggatggacgggggggcagtatcatggaaaaagtttgagaatatacaaaggtaggcaaaatagcataagaaatcccttctactcattgtctgcagtcatcagctcatggcccaacctgttgtgtctatacccccatcacatcactggcattgtttgtaaagcaaatcccagacatgataccatgtcctccataaacatttccatatctgtgttttgtaaagactcttgcagaaagctgacttctgaaccaaagccccatgcatatgtgcccttggaaggtcactacctgatactgtctattgctggaaaaagagcagcttgcataagcatttttacccacaaaactgaagctatagaatacactagggaaatgcagctcattgcttgggagttatgcattagatatgctatgatctggttctacaggcatttattgattattgactctttgctaggaactgttttgggcattaggacatggtccttgcccctgagatactcaccatctaatggaagacacagaccaaaaaacaagtaatatagtcaatgtcatgtgtggtatgtaatagcaaaatgtatcccgtactgaatgctccagactggtggaaaaatcataataaaataagaagcaagaacggcagcagaatagctggggtttactgagaacttactgtttcgagcacccaagatacaaagcaacacgttagagaagatggtcattgtttggaaattagagaaaagctgctggaaaagaggatttagagatatagtttggaggaccacaaccagcttgcacatgtttttatggtttagaaatggcaactccagaatttttttttttttttttgacagagtctagctctgtcgcccaggttggagtgcagtggcgtgatcttggctcactgcaacttctgcctcccaagttcgagcgattctcctacctcagtctcccgagtagctgggactacaggcacatgccgccatacctggctaaatttctttctatttttagtagagatgggatttcaccatgttggtcaggctggtctcaaactcctgacctcaggtgatccacccacctcggcctcccaaagtgctgggattacaggcgtgtgtcaccgtatccagcccagaattctgaccgcgtggttctcagtccaaaaacattgtcccccttcctgagtcagatggcaacacaaaaatgccttgggaaccagctgggccatttcatgcagcagtaattctctggatcagtctcctcgtgtgactgatcctggttttaagaaacttgcttctatttcctggtcagaaaagtctctccctcctgcctcatcttttctacccctgtttagacaccactcctagttcaaagcaccattgcctcctgcctggatggttgtagtggtcactcacctggtttcctttcttctactattgctctaccatcatcagctctccttagaaatcagaggatcagtggggtgtggtggctcatgcctgtaatctcagcactttgggaggccaagacaggaggatcgcttgagcccaagagtagttcaagaccagcctgggcaacatagtaagaccctatatcttaacaaaaatatatattttgtatgtatatctttttatatatatatttgtatatatatttatagatgcatctttatatatatttatagatgcatctttatatatatttatagatgtctttatatatatttatagatgcatctttatatatatttatagatgcctttatatatatttatagatgcgtctttatatatatttatagatgtctttatatatatttatagatgtgtctttatatatatttatagatgtctttatatatatttatagatgtctttatatatttatagatgcatctttatatatttatagatgtctatatatttatagatgcatctttatatatttatagatgtctttatatatttatagatgcatctttatatatatttatagatgtttttatatatatttatagatgtctttatgtatatttatagatgtctttatatatatttatagatgtctttatatatatttatagatgcatctttatatatatttatagatgtctttatatatatttatagatgtctttatatatatttacagatgtctttatatatatttacagatgtctttatatatatttatagatgtctttatatatatttatagatgtctttatatatttatagatgcatctttatatatttatagatgtctttatatatttatagatgcatctttatatatatttatagattttttatatatatttatagatgtctttatgtatatttatagatgtctttatatatatttatagatgtctttatatatatttatagatgcatctttatatatatttatagatgtctttatatatatttatagatgtctttatatatatttactgatgtctttatatatatttacagatgtctttatatatatttatagatgtctttatatatatttatagatgcatctttatatatatttataggtgtgtctaaaatatatatatgttttatacatgtataaaagaaaccagaggatccaaaaaaatagagcctgagggtggaaaaaagaaatcagagaagccatgaagaagaaaataagccagacagaatggcgtgcacctgtggtcccagctacccaggaggatcccttgagcctaggagtttgagtccagcctgggcaacatagcaagtgtccgtctctaaaacaattatataaataaataaaatttaaaaaataaattttaaaaagaaaatataatttcatccgtctttcttacacacacacaacttttaaaaaaactttcatggcttcagatcatgcacacagtaacacttgggcttcttaccagagtctgcaagaactgtgatattccagccccaaaaacccctctgctcccgccgcccagcctccatccaggtccctgaggaagccagtatcccccatggctcctcacctcggcacacggcattcccacctctttccctcgtgccactggccccaccaccctcccctgctccagtctggttcctattctccttctttctgttgccacatcaggtgtcactaccttcgtagagccctcaattcacccacaggacagctccctcttacctgcttctctcacacccctcctgtagattttaacgctgggcacactttactttaccctcttttgtccactctaagatccacctcctcctgtccccactctctcacatctctgaaatcaggctgtgtcctacatgggtggcagtcatgcttaagttgtgggcatttttctgtttcctgtgggtatataaagtaacagtacatcttacaatccataccaccatcttggagtctacagaaagcaccatgtgtttgcacaaagtctgttttccttgcacagagctggaggatgagtcccatggctagtcccggggccaagcacagctcctggtacaaagtgaggctctgcccagaacagggccagacacacccttgatgcatcaggtcagattcaagaaccaggtggttccaaacagcagagatcgttttgaagggtaaagagataatgcatttgtgttacaagttaataaatgatattacagtcattcgtgggcaaagcaaggcaaaggggccagaggacttagttatcatggtccacagagaccttggaagagaaaacatttgaattgaagcctgaatgggagaaggaaggagccatgcagagagctctctggcagaggagacgtctcaatagagggtttccagatggagggattctcagccttggcactcttcacatctggggccatgacagctacgtgagtgcatgcggtggtcccagctacctgtcccactgcactccagccaggatgaaagcacaccctccctgaccaccctcaagtgatctggcacctgataagctctgacgtggcctcctgtcccatccttcctttctctctctctctctaatttttttctttttgagatggagtcttgaaagaaggaaggaaggaaggaaaagggaagagagaaagaaagaaaaagaaagagagagtaagaaagaaagaaagaaaaaagagagagaaagagagagacagaaaagaaagagaaagagagagagagggagggagggaaagaaagaaagagagagatgaaagaaagaaagaaaagaaaagaaagagagaaagaaagaaaagaaaagaaagaaagagaggagggaaggaaggttcttaggatgctataggtcaaggtttcaacctcggaactattgacatttggggttggaccagtccttgtggggccgtcccatggcttgcagggtgtttagcaacattcctggcctccacccactagacgtcagtagcactcccctctccagtggcagcaaccacaaatgtcttcaaacatttctaagtgtcccttgggaaaggcaaaatcaccctggttgagaaccactgctgtggaagacttcaaccatgatgaacattaagccccatcactccgttcaaaccaaaaagtgataaagtctagagtttactagaggtcagtggtatgccaggaaccatgcttcgcttgggatgcaccctttaaccatccagcaaccccaccaggtagagcatggcatctccctgtgttacactggagaaaactagagactctgagggtttagtcaccttgctgtaggtcatgtgtagcaggggcagaccttgcatcccaacaggaggttctgctggctctgggacctgggctctgccctgtaccgtctccctgcttacagactcaaaagcagtatctcctaacatctcagcctctgcacgtgccattctccaggcttacatacagctctgctaactccccttctttctttattgagttccaggacactctaaagaggtcacttcctgctgggcacagtggctcatgcctgtaatcccagagtcttggaaagctgagacgagaagataacttgagtccataaattcaagatcagcctgggcaacatagtgagacagaccctgtctctacaaaaaattttaaatattagttgggccatggtggcacacacctgtaatggcagctactcaggaggctgacgtggggggatcacttgagcccaaaagtttaaggttgcagtgaaccctgattatggcactgcactccagcctgggcaacagagagacagagtgcctctattttttttaaagaggccacttgctatcagaagagtttcctgagcatcccccgcaacctcaccctactcccatttttgctatctccatgggccctacttctcctctcttagctccaattatgctataatgcagcacatgcatttttgctgatctgctgacttgcctcattggtgtgaagcaacagctgggacagcaactgctccacattcccccggatcctccttcaacttctcccactcctgggccaaaggtgtgcatttagctccatagcaaagtgtcatggcttctgcagaacactctggtcaccaaggcgagaggcaacacaggtggacacgggtttcagtccatctttgtggggctcctgcttgtccttgctctacctggctctacatctatcttctcttcttgacttcctgtcctgtggacttcaagcaccaacatcagaaacaaataaatttccttgcagaatcttcttaaccagctgcacaactgcttaagatcaaattctagagttcctgcctctctgcttgagcactgacatactttggtatcagactatatagttattgcctgcttgctttcctgtcttctcccaacctactcctccaaacctaggaattgctcccccgtttcctagaacctgccactccctctctgaaattctgagctccgaagggcaggaaccccaccttattcagttaaaactgctttcatctgaaaaaaggtcatctaagttttcttcccactgattcatcttagtaagatggtcaaatgtcttagcagtggagtaaagactttggaatctgaagtaaaacagacctagacttagttctttgtttcttcccttttcaagctatctaaccaagggctgagccttagtgccgtcaagagtaaactgggagaagaagattactacatgcagtggtgttgtggagaagaactgagagaagccatgcaaacgcttcagcacaatatctggtatcagtaggtgctaaatcttggctctcagctgtcatgattttgagtttggctgcagaattcagctcagagggaggcccacacgatttcgatttgccccagattcaaattccaaatgcacagagctctactgatccaatgagaagaaagtcattcggtgcagtgattcccaaattcttccttgatgttcagctattccttccttcagcactcggtgaccatcttctgtgtgccagaggtctgtaatttttgtctttgttgttgttttgttttgttttcaagatggagtctcgctctgttgcccaggctggagtgcagtggcgcaatctcggctcactgcaagctctgcctcccaggttcaagcgattctcgtgcctcagcctcccgagtagctgggattacaggcatgcgccaccacacctggctaatttttgtgtttttagtagagacgaggtttcatcacattgtccaggctggtcttgaactcctgacctcaggagatctgctggcatctgcctcccaaagtgctaggattacaggcatgaggagccactgtgcccagcctgaggtctataattttgaatccacacgtcatgtggctgccacgtctggaaaatcccatctccagggctctccttgactccatactcagtcccatcctttccattcaccagcctgagcctgcccctgttccccaggcaaatgggagctctcctggaggcaggtcagtgattccgaaatgacttcaatgggagagatggaggacagtgcaaggggtgcaaccacaggcttttgcatattcatcatgttgggttgctacaggagcatgcacatttggctgtgtaaacctcgatagaccttattagaaattacaatgttcctgcaaaccctagtgatataaaaaaactcttcccccaagtcaacttttttttttttttttttgagacggagtctctctctgtcacccaggctgaagtgcagtggcgtgatctcggctcactgcaagctttgcctcccaggttcacgccattctcctgcctcagcctccccagtatctgggattacaggcgcctgccaccatgcccggctaattgttttttttgtatgtttagtagagacggggtttcactatggtctcgatctcctgacctcatgatccgcccgcctcggcctcccaaagtgctgggattacatgcatgagccactgcgcctgactgagtcaacttttattttaaaaatactaacccactctctcctccagtcacataagatgcaaaaaaaaaaaaaaaaaaatgccaaggagaagaaggtggccccagtccctgctgtcatgaagaagcaggagaccatgaaactggtgaatcctctgtttgagaaaaggcctaagataagaatcttggcactggacaggacatccaacccaaaacggacctcacgcgctttgtcaaacagtctcacgttgcagtggcaaagaaccattctttccgtgagtggctgaaagtgcctcctgcaatcagccagttcacccaggcctcagactctcacgcagccacccaactgcttaagctggcccagtacacaccagaggtaaagcagaaggagaagcagagactgttgtcctgggctaagaagaaagctgtcagcaaagggaacacccctacgaagagaccacccatccttcaagcagggttaacactgccaccaccatgttcacacacagcaagaaggctcagctgatggtgactgcgtgtgacatggatcccagcaagctgtctgtcttcctgcctgccctggattgtaagatgggagttcctgactgcattaatgaggggaaggcaagactggggtactgagtccacaggaagaccagcaccactgttaccttcacgccagttaacttgggagacaaaggagctttggctaagctggtggaagctaccaggaccaattaaattaacagatatgatgagatctgtagtcactggggaggcaacatcctgggtccaaaatccctggcttgcattgccaaagctggaaaaggcaaagactaaagaacttgccaccaaactgggttaaatctacactgctgagttttctgtacataaaaataattaaaaattctcctttaaaaatatcaagtagctgcttctttagagctaggcaccggattacccactgggaatacaattgcgagcaattctcttaaaaaaaaaatagatatggccaggtacagtggctcacgcctgtaatcccaacagtttgggaggctgaggcaggtggataacctgaggtcaggagttcgagaccaacctggccaacatggtgaaaccccgtctctactaaaaatacaaaaaattagccaggtgtggtggcacatgcctgtaatctcagctacttgggaggctgaggcaggagaatcacttcaacccaggaggtggaggttgcagtgagccaagattgcaccattgcactccagcctgggcaacaagagtgaaactccgtctcaaaaaaaaaaaaagaatcagctcaaaagaatcctgatgtcaaagagacacatctggggacagcatattctggtcccctacacaggaaatgcacagatcttgaacacatcggcagaagcaggcttctcttgtctcctggtagcatcattacccccaactgtcttcacgctcattcaccaaaaattatttatttcatcaattcatcaatttttgcttgtcaaaaattggatatgatattggcatgcatctatggggtactgattaataataataatagagttttttttttaaaaaaaaggaaggccaggcaaggtggttcacgcctgtaattgcagcactttgggaggccggggtaggcagatcacctgaggtcaggagttcgagaccaacctggccaacatggtgaaaccccgtctctactaaaaatacaaaaattagccaggtgtggtggcgcatgcctgtaatcccaggtacttgggaggctgaggcaggagaatcacttcaacccgggaggtggaggttgcagtgagcacagattgcaccattgcacaccagcctgggcaacaagagcgaaactcagtctcaaataataatgataataataaataaaagatggaatactacacagctacagaaaaggaacacaggagtgcttaagttccaaaatggcatgatctctaaaatatatttttgtgaaaaaacaagatacaaaacaatggatttaatgtgccaaattttataccacaggggagaaatgtataagcacacctcctgtgtgtccacagacacctctgttttcttgcttgtatcattggttgcctccagggaaggaaaccaggtgcccacaaaactgagaagagagtcttcacgaaatctctttctaaaccttttaaatgtatcacctattcagaaaatgaatggaattgaatttacaataaaaatagcactaaaatataaaataaagtggaaggatctgttgtccagagagatagagacagggagagggagtgaggcctgtgccaggctgtagatgcagttgttgtgattgagttttctggcgccaggctcgtgggctgaagccccagctccacaagttactagctgtgtgctctcaggcaagttacttaacctctctgggcccgggccacctctgtaaattaagcatcataaaattacccccttcatgtggttgttaggcaaattaatgaatatggtaaaatgcttgaatacagggtctggcccagagtaggttgtgtaatcatttctacagctacttttctccatcccgggctgctaatgacatctgtatgattagcagtactctgcgctgagccctgaggatgctggggaggtagtgatgcccaaggaggaactctccaccccatagcataggaatggccatacatcctagtagggtgaggactccaggctgggccactgcagagaaaggcgccagccccagttaggaagacgtctacacgatgtgttgcctgagaagagtacaccagcctctctatgccgaagcctggttctactccatcctggctactggacctcagataagaagtcattgaactgccctgtgcctcggtttccccatctggaacaacagtatattgatagtgtcaacctcggagagctgttgtaaagatcaagtgagatgatcctatgaaactctcagcacaggcagctattattattattgctgctgttgttgttgttaaggagcgaggctctgaggagtgggtaaggataaggtgggtacagataagcatgggatggtgcacgcgagaagcaaagtttagtgtttttggaaagcagaaaagggctcagcgagtcagtgtattaattttctagagctgccatcacaaagcgccacacaccaggtggcttctacaaccgaaatcaaatttctcatggtcctggcagctggaagtctgagatccacgcgtcagcaggattggcttctcctgaggcctctccccttggcttgcagacgccatctttaccctggatactcacgtggtcgtccctctgtgcgtgtctgtatcctaatctcttcctataaagacgtcaatcatattgcatgaggcctaccaccctaacaacctcattttacctgaattacctcttcaaggaccctatttcaaaatacagtcatattttgagggcctgggggcgaggacttcaatatatgcatcttggaggacacagcctcgcctgtaacagccccaagcccaggaggtgggctgggcagtggtaagaggaggctggagggtttggtaaaggctggatctgggggtctattttacaccacagtcagcagcctggcttccaccctgagtgcggtaggagcccccatgggtcacaggagggcagggtcacactctgtgtccaggcaggacggcaatggctccctgtgggcccaactggatgctagaggaggctgtgtggaaatccaggcaaaggctggagacacggctgggtcagtggggtagacaggtctgggtggaagagagtttgcacccatgccatcaacgcatgagcatcttggcttccacctcccctactagcaacaaagctcgtaaatgagctcgcacccctgcctctcccctccgctccccttctccatgggaggaaaagggactgggtctaatgccgtttctttctcaagctctgcctgtgatttctttcctgttgtagattttagactaactctgtggcgccctctactgaccaggtgcgtctcgcccagagcgctgtccagccccttgaggtccagtcccgcggtctgaggccaccgtgactacagacgcttgaagaggagctaggggaattgaggtgggctcaaaggaaaagcacacgccggatctcagagactttgttaccaaaaagcactggaaaatatctcgttaacagtgttgtgcaatggctgcatgttgattacatcatcgtattttgaatatattgggctaaataagatacagtctttttttttttttagtcggagtcttgctctgtccccccaggctgaactgcagtggtgcgatctcggctcactgcagcctcctcctccctggttccagcgattctcctgcctcagcctcccgaggagctgggattacaggtgcacgccaccacgcgcagctaatttttgtatttttagtagagacaggatttcaccatgttggccaggctggtctcgagctcctgacctcaagttgatccacccgcctcagcctcccaaagtgctgggattacaggcatgagccaccacgcctggccaagatacagtcttcaaattatttttacctgttcttttttactttattaacataggtaccagaaaactttaaatgatatttgtgactcatataatatttctttatttccccctgctttagactattataaatgtaatgtatacataccagggattcgcaaattcggcactattggcatttggggctggataactcttggtgatggctctgtgctgtgcatttgtgggatgttgagcagcaaccctggcttctacctatgaaacgtgagtgtccctgcctctcacccaattgtgacaaccaaaaatgcctccaggcattgccaaatgtcccctggggcacaaaatcactcccaatctagaatcattgaaatatatatgtatatgaaaaagagacattgatgaaatgaaaaaccatgaactctaaggacttttgactcttacagagcaccatcctgtgtgagctccgtgttgcatgcccacctgtgtttccctctcagtcctcataatgaccctacagggtggacattatcattatgccctttttgcagatgaggaaactgaggcactgggtggttaagtgactggccctgaggtgcactgctaatgggtggcccagcccagacccaaatccaggccacgtccccggtgtaagagaggcgagcgtgtgcctggcacctgcagacccacggtgagaacccagatctccactgagtgccccatccctgacgtggaacctgagtcctccctttggggaggaaggtgaagaagtgggtaggagtcacgattaactttacctcccttggtggccaaaagaaaccagaaaataagctccattccaaccccttcctgtggaattatgatagagcaggaaagcatagcagagcacggtggctcacacctgtcatcccagcactttgggaggctgaggagggtggatcacttgaggtcaggagttcgagacctgacctggccaacacagtgaaaccccatctctactaaaaatacaaaaattagccaggcgtggtggtgtgcacctgtaatcccagctacaagcaggagaataccttgaacacgggaggcagaggctgtagtgagccgagattgagacactgcactccagcctgggagacagagcaagactccatctcaaaaaaaaaaaaaaaaagaacaggaaagcaggaatccattcattcattcattgcagtcaggtcgtgtgtatggaggccctgctgtatgccaaagtctattgaaggcagtgagagtgcagccatgaagaaaacaacacagctctgctcaggaaactcaccgacactgaacaaggatggggaatcacagaaaaaggaatttaaaattaattaattaattaaaaaaaggatttcaggcctagacaagttatttggagaaaataagacagagaaatgactagcatgaggacagacgtgaaagactccagaaacatttttctaaggtgtctcccgggagtcacatgtttaatccgcattgcgggtgattctgcagtgagggagggggcttagggcatccttggcaaaccctgccttggacccagcctgggttagcccccctaggcccatggggggttcagggtggaggagaagcagcctccacccagaccctcttctgtgtacccaacccccaagtctttagggagtccccgcggtgaggccaggctgggatctgaacccgcaggcatgcacaggctaagccctgagcctagaaaattccaggccccgcatccctccagcattggcacagcccctcctcttctccgcggtttccatggcaacagctgtcgccaggtgagatctctcaggggactgagcctcccaggagccaggtggggatggggagggctgggcgcattcatagtccactcttgactttgatgcagttaaacgcatcctcagacaggggtctttgcagaacagggcagaaaaacaggcctgtgcgggtctctgcagcctctggtagaaatcccagatcgccagaaatgactagtgacagaaatgatatctgtccgccctttcactccttcattcattaaaccacttaatttttgcataaagatcaattcgatcagtatagatgattaatatgagagttttatgaatctattaatgctgtatctatttcgagctgctggcattgttctagggagacagtattgatgaagaaaatacctgcagtgcttccttaacagggttggcttagatggggctgccgcacaaaacaccgcggaccccgatatgtaatatgatggcaggctttgaaaagttctgtggagacgagtaaagcagcccgtgttgtttgggatttaatttccttcattgtgaagtggtgatacattcgcagagtcaaaatgacattttaagatgtgattttaactctgcgactggaataatttctggggaaacattgtgtaatgaaaattaaacctcatgccctcatcccaaggcacccgacacccctcccggaagccacgtctgttccacgttccacattccttcttgaataattctgagcacaccgtattgtcagctgccctccccaccattttatttatttttattttttaatttttttttttttgagagttttgctcttgtcatccaggctggagtgcaatggtgcaatcttggctcactgcaacctctacctcccaggttcaagcgattctcctgcctcagcctcctgagtagctgggactagaggcacctgccaccatgcccagaaaatttttgtatttttagtagagacggggtttcactatgttggccaggctggtctcaaactcctgacctcaggtgatccgcctgcctgggcctcccaaaatgccgagattacaggtatgagccaccacgcccgaccagtctgtgtatttgtttgtttgtttgtttattgagacagagtttcactcttgttgcccaggctggagtgcaatggcacgatcttggctcaccgctgcctcccaggtacaagcaattctcctgcctcagcctcccaagtagatgggactagaggcacctgccaccacacccagaaaatttttgtatttttagtagagacggggtttcaccatgttggccaggatggtctcgaactcctgacctcacatgatccgcctgcctcggcctcccaaagtgctgggattacaggcataagccaccgcgcccggccggcatactcacttttcatatacaattagagcatcccattgtgtcattgtcctataactcatttaacctatctcctcctcatggatgttcagattgtgttcaatctttcatcataacaaatgctaatgctgctgcagtggattaccacagaagcatgttccttcacacatgcgtaagtaaatccgtacaatatatttctagaagtggaatttctcagtaagaaagtacaggcatccacattttgctaaagtgcccaccataaaggttgttccacgttgcacgtccaccaataacatatgaaaattcaagcgccattgaaacccataaaatatggattttcccttgaaaaattagaagagctaacaacactgggtttgatttcagcttgggaacaattgggtggtgtctggtggtactgcccacttcagcaaaacacactctctcccttttttccacactccccacccctccctattacttcccaatgcccccactctgtatcagtgtctgattaggatcatgcttgaggtgaccattgccatttcataggtgacgttactttacaaccttgagaatattgaggccaaaagagtcacttatttgaagaaaatgccagaccctttccaaccaaaatggttgtgccattttatactcccaccaacactgtgtgctccttccagccaccccacatcctcaccaacatttgatgttgctaatctcttcatttttaccgttctggtgagtgtgtcgtggcagaatcacttattttaagaaaaataaagggccaggtgaggtggctcacgcctgtaatcccagcactttgggaggccagggcaggtggatcacttgacgtcaggagttcaagaccagcctggccaacatgatgaaaccccgtctctactaaaagtacaaaaattagccgggggtggtggcaggtgcctgtaatctactcaggagtctgaggcaggagaatcacttgaactagggaggcggagcctgcagtgagctgagatcgtgccaccgcactccaacctgggtgacagagcgagaccctgtgtcaaaaaaaaaaaaaaaacaacttgcatttggcccgggcgcggtggcccacgcctgtaatcccagcactttgggaggcagaggcgggcggatcatgaggtcaggagatcgagaccatcctgactcacccagtgaaacctcgtctctactataaatacaaaaaattagccgggcttggtggcgagcgcctgtagtcccagctactggggaggctgaggcaggagaattgcttgaacccaggaggcggaggttgcagtgagctgagatcgcgccactgcactccagcctgggcgacagaacgagactttgtctcaaaaaaaaaaaaagaaagaaagaaagaaaaagaaaagaaaaaaaagaaaaatgagccaaggaggggaggctgtatctttatggaaatggagacattccacattgttgaatacacacaagccccgcccactctctccccctgcaggacctccccagcctctggggtggaagtctttgccttgggcttcagaaatgtctgagaacacgggagtgagctcttcatccaggtaagtcatgtccccacgggttgctcctcccactttactgttcccttcccttgattctgggtctagacagagacattctcttactacctggggaggttggggcagaggtgggtcctttaccttccagagtctggagagtaaccaggatttgcttttttttttttttttttttgtcggagtcttgctcagtcacccaggctggagtgccataatagctcactgcagccttcaactcctgtgctccagcaatcttcccacctcagcatcccgagtagctgggactacaggcacgtgccactacacccggcaaatttttttttttttttttagatggagtctcactctgtcacccaggctggaatgcagtggcacaatctcggctcactgcaacctctccctcctgggttcaagcgattctcctgcctcagtctcccaagtagctgggactacaggcatgtacagctacgcccggctaatttttttttctctttctttcgtagagacaaggtcttcatatgttgcccaggctggtctcaaactcctgagctcaagtgatcctcccatctctgcctcccaaagtgctggaatgacaggcatgagtcacctcactcatttttgcattttcaatcatccatctccctaatcctccccatttgatgcaagtgaagttggggacacattgaaaaaaaaatcctggctatgctgtggcaggcatagtgcccagtgattcacaagcagcttcccactgtcatcctcaccacaacctacagattcaaaaaaaaaaatgtttacccagttttagatgagaaaacaggctcagaaaagtgaagtcactttcccatgattccgtactttattttgttttgttttgttttactttattttttgagacagagtctcactctgttgcccagcctggagtgcagtggcacaatcttggctcactgcaacctccacctcccaggttcaagcaattctcctgcctcagcctcccaagtagctggaattacaggcaccctccaccacaccccgctaatttctgtatttttagtagagacagggtttcaccatgttggccaggccggtcttgaactcccgacctcagatgatcctcctgcctcggcctcccaacgtgctgagattacaggcatgacccgccatgcccagctgtattttcattcacgctcctaacacacacacacacacacacacacacacacacacaaatcattataggcactcattcatatggcagctcaggattctaacccacacacagcctggaaagttccatcctctgagtgcctctcagcctcctccccatctcctcgatgcagtttccatagcaacaggcagagcctgcctgcatcccagacccccagcgaaggctgctaaggaccagggcagggcgatgggggagaagccgagcagggggagggagcaggcctactgtaccccatcggagattcaggttgggcatattaaaacttaaaatgtgcacatttaaaatgatgtccttgacgaagggcaaaacccagccatgtgtgctttgccaacaggcgtggaaatcacaggtttctgttccgtggcagccgccagcaccgatgatacaaacagcctttgttgtctaaagattagtcatttgattgactgattataccaacaaatatttgttgattgcctactgtttgccagaccttgtgcgaggcggcagcatccaacacagatgtagtctttgttctcattggagttgacaacttattgagacagataataaatagatattgaagtggatatagctatagagctagggctggagactgaggaaagaaaagaacttctgtctgaggaatgtgagggctttcaaatgatcggggccggagaagcattaaaatgacgcagcagtcacaccctactcccagctttcagaatctcttgaaactgcttgctattgccataagtagctgcaaattaaacagtccccagtgggacactaaaacccataccctatagcttaacaattgtcagcagtaaaaaccagattctgccaaatatttaaagaggtttattgtgaaccaggatgagtgaccgaagcctggggttacacagtctccagaggtcctgaggaggtgcgcctgaggtggtcatgttccggtttggttgcacacatttcgaggagacaggaattgcaggtaaaatcataaatcaatacactgagggtatacatgagctcggcctgaacccgtggacatcttgaagtcaggggcttacaagtcatagtaggttttaaagattcttttttctcactccttcctgcatactgaaaacgtttcttgaggtgtgtgtgtgtgtgtgtgtgtgtgtgtgtgtgtgtgtgtgtgtgttttgacacagttctcactctgttgtgcagtggcatgaccatggctcactgcagccttgacctctcaggctcaactgatcctcccggctcagcctcccaagtagctgggaccacagatatgcaccaccacccccgcctaattttattttactttttgtagagacgggttctcgttgtgttgcccaggctggtctcaaacttctgggctcaagcaatctgcctgcctcagcttcccaaagtggtgggattataagtgtgagccactgagtccagccttaaggattctttagttggcaatttgaaagagttacactttgtttaaagcaactcagtagaaagaaatgctgaagttaagggggtctggtctccatcacacgatgctataccagagatgggttggaagtcagccacctgatactgcgttaataaaagaacctgcttaacaagattttatggtttgtagagtgtgactacctgggccacctagataggaatttaggtaagagagaaaaaggtcgcagagtcctcacaatgcacacctaatcactaaccaatgttatttctgtaaattgtaaacaaaaaaataaaattctaagccccccaacctactgatggaccctcccctcagccaggggcattccaaagttaacctgaggctgggtgcagtggctcatgcctgtaatcccagcactttgggaggccaaggcaggaggatcacctgaggtcaggagttcaagaccaacctggccaacatggtgaaaccctgtctctactaaaaatacaaaaattagctgggcatggtggcacacacctgtaatcccagctactcgggaggctgaggcaggagaattgcttgaacccaggaggcaaaggctgcagtgagctgagatcgcgccattgcactccagcctgagtgacagagtgagacgccatctcaaaaaaaaaaatccacttgtggctgggtgcggtggctcatacctgtcatcccagcactttgggaggtcgaggcgggtggatcatttgaggtcaggagttccagaccagcctgaccaatatggtaaaaccccatctctactaaaaacacaaaaattagccagcatggcagcatgcacctgtagtcccacctacttggggggctgagacaggagaattcctcgaagctggaagacagaggttacagtgagccgaggcaacagggcaagacaccatctcaaaatacataaataaataataaaaataaataaaaattaaaattcacttgtaactgctgctaatcagagtgtgaatcaggggaagtcaaatctgtgctcttgggttgtaatcctcaagcttggcccaaataaactcttaaattagttttgcctcagcttcttccttttaggttgaaaggatagagacacacacatatatgcatacgtattttaccataatctatatgtacataggtagcaccatatagaacaaaattttttgtagttttgtcttttgacattggaaagcacagctctaaaaactactaagaaaaaatatatcaggataaaaataaaaagagcagcagattgtgacggtgaatgaatactttgcacaaaatattttgtttcaggacgtccaggtcgtagccaggaattgacatttcgacaagcccctacctgaaccaggtgaccaccttggtagcagaccccaggcaggcaggcaggcagggagtcctcagatcctcccaacagccctgctagctaaggatggtgatcacacctgctgcagaagagtggaccgaggcttcagaggggaaagcagtgaccaaagatcagattgtgcctctccatctcttcccaaataataaatacaggtatttattgtacccctgctctgtgcccacacggggcttttacatccacgcattctgtgctcaagggcatggaaaattccagcctgaaagccttgcttgccccatcctgtcccccacactgcagtggtttccatagcaacagtcttggtcgcaaacatcccttgagtcccctgaaggggaggaggagtggttgatgtcagaatagcctgggctgagggtggtgggacaaggggaaggattgaattctgcaattcccaccccaccccatattcctggttcactcaagcctttagggttcattcaaggtctccttgaatggggttttcgtagaagaacgaaaaaggacctgggcatgcaagtggctgctggctcaaaaaaaccaaacaaatagaaatcccaggttctccatggagcagctgccgcaggtgcctgtgacacccccagcatctatgcccacctttcagtcgcgcctcattcctcctccaacacaagttgacagagagcatattatgtgccagggataatgttaggcacttgagcataatttcaaaaacctgctatgatgaataaaaactggtctccaaaagcctcaagtgtctccccaaaaaaacacaaatgcatgaggtcctcttattctcatttcaaaagatgtggggaccctgttttctggcacgtgggaaccccaaacacctggaggaactaagaggaaatgaatgaaactcaagactcaaccatcacccaggacccaaattacattacttttgagctcagcagagtggggaaaggtggccagtggagaccgttaagggagacacattcagaaattaactgctgttgattgcaagatgctgcgatgattcaacccaactcaaaaatctcaggacatgtgcttcccagttgaacttttgatggttggagagattctcagtaattgtgtatggcagaaaaagaagcatatggtatatggaacacacagcactgaacatctgcttgagcaaatgtttgtttcttttttcttttccatgaaactgcataaactgtcaacgttttattctaatgattatgggccttttcatgggttatgtttttttcaaaagcatgcccatcctggctctaaaatatcacggtcctcaacagatggtggcagtttagaagggagcgtttgtgcaaaaggccatggagaataaacttaaggtgtttgtcttcagagagagaacacaggctgaagaattaaaagagaatgacaaaaacccacacagataggtgttctgaaatataggccaggtgcagtggctcacacctgtaatccatgcactttgggaggcccaggtgggtggatcacctgaggtcaggagttcgagactagactagtcaacatggtgaaaccctgtctctaacaaaaaatacaaaaaaaaaaaaaaattagccaggcgtggtcgtatgtgtctgtaatcccagctactcaggaggctgaggcaggagaatcacttgaacctgggaagtggaggtcgcagtgagccgagattgcaccactgcacaccagcctgggcagcagagcaagagaaagatcgtgccactgcactccagcctgagcgaaagaaagaaggaaggaaggagggaaggaaggaaggaaggaaggaaggaaggaaggaaggaaggaaggaaggaaggaaggaaggataaaagaaatatacagggtataggggagttagcaccagcctgggccacattatttattccttctggcatccctctgcctggtcacaagcaaacttaaaacattgccagctctgtgttttaataataccatgtcttgtaatagcaaatgactggggaaaaaacctcaatttccctccagagggggctggccaactaagttctgataaatgcattcgatggaatgttatgcaactgtgtaaaattctgaagaagttctttaggggctgaacaagcagaatatacagtgaaaggatatataataatgaaaagggttgctatgattgtgtaaaaggaggaaaagagaaataattacattgacttggtccagaaggaacctgaactgtaaatcacagttccatgaggcaagggggtcagattttgtagcccctaacatcaaacattggctgcccccaattgtggggagagatgaggtaacctcccgggtgtctgtggatgaggtggttccaggggcagctcttcagaggacaaggtcattagctgcgcctcacccacactgcctgcccaagtggggttggggcatccctgtgtatgtgctttcagaatttcaaacttccttccccatgaacggagtcctgtatttcatccgatggacgatgctgtccactgtggaggcaccattatttcctagccaggaagaacaataaagcatggtcaattaatgcaactgactgtaaaaggcagcccaattcctgagactgtgtaatgagtggaaaaaagtgagcaaagtggggaagaaagcaaaagcatcttaaagtgaaaaacatgcattagctgtcgtaaacaaacacacacaatgcccagggcactcctcccacagtggagcactcactaaatgaatgaatgacaggccctaccacaccccaacacacacacacaatctacccagtgtgggggggctcttccccagaactcctcccacagtggagcactcactaaatgaatgaatgacaggccctaccgcaccccaacacacacatacaatctacccagtgggtggtgcttactgctcagctgagtactgctaaaaattgccgacaagacttactctctgggtgatttgatgaaatccttgatgccagggggaccactgagtttaacgggcgtctaatctcctcacacacccccatccatgtcaaatgggaggccaggcagggcacagtggctcatgcctataatcccagcactttaggaggctgaggcaggaggatcacttgaggcctcaagtgaccaggagttcgagaccagcctgggcaacacagcaagaccccacctccacaaataattttaaaaattagccaggcatggtggtgcctgcctgtggttctagctacttgggaagctgaagtgggaggatcgcttgagcccagaagttggaggctgcagtgagctaggatggagccactgcattccggccagggtgacatggtgaaaccctgtctcaaataataataataaaatataaaagggaggccaacaggctctggcagagaccttctgggcaactccaccaagaaatcaagtccccatctccagaaaccccactttgaggtccagctcatggcttagctgcaggcgagataggatagacaaagagaccatgtgagtcagggtcctctggagacatagaagcaacgggacattcattcattcattcattcattcattctcaggaattggctcttgcgattacagaggctgagaaatccagacccaagagggccagtggtgtaaattccagtatgaatcttcatcccaaggcagaggcagtctgaggtcccaactcatgcagtcaggaagagaggaaggatcctttctcactcagctttttgttttatgcaggcttttgactgatgagacaaggcccacccacactgtgtagggccatctgttttagtcagggtatagatttgaatgccaaactcaaccagaaacatcctcacagacaccccagaaatgatgcctagccaatatctgggcaccctgtggtccagtcaagttgacacaataaattaaccatcacagatactttttcatacattttattattgtactaaatattcttttgataaatttggaatttagggtaggttgaagactgtgaggagggagtagagtggggaaaaggaggatttgaggtaagatatggttttgggggcaagatgatataaacttttattttgcaaaaatttcaaatttataaaagcaatttcaggaatgatgcaaataactcccatttaaccttcacccacattcaccaattgataacattttgccacattttctatctctctctcactctttttttttttttgagatggagtcttgctctgtctcccaggctggagtgcagtggtgagatcttggctcactgcaacctctgcctcccaggttcaagcaattctcctgcctcagcctccgagtaactgggataacaggcgtgcaccaccaagcccagctaatttttgtatttttagtagagatagggtttcaacgtgttggccaggctggtctcgaacccctgacctcatgtgatccgcccacctctgcctcccaaagtgctgggattataggcatgagccaccacacccgacctctctcactctttttctatctctttagtgtaagttgcagatatcatacccctctgctcctaaatttttccgtgtatattttctaagaataaaggcattcttttttcatagccacagtacaatgattacattgagaaaatttaatattggctgggtgtggtggctcacgcctgtaatcccagcactttgggaggctgaggaaggcagatcacaaggtcaggagattggctaacatggtgaaagcccatctctactaaaaatacaaaaaattagccaggcatggtggcaggcacctgtagtcccagctgctggggaggctgaggcaggacaatggcgtgaacacgggaggcggagcttgcagtgagccgagatggcgccactgcactccagcctgggcaacagagtgagactctgttatatattattatataataataataatattgaggcattatattcattttatgcatagcccatgttcacacacaaattattccaacaacttacttgatagcattttcccccaatcctggatcaaacccaccgcttgtttaaagtggtgtctggcactgtgaagttatttcccctcgggattaattgtctgtggaaactgctttgaggctatggacggctcctgcgtcttctcatgcttgtgcccacgaggcctaggatcctttgatggttcttagatgctttgatggtcctggatcagatccaggatgatgcattctgtttagccatcttgtctcttgagtctttctaaatctggatttgaaacctcagctgttcctcatcttcccgacactggcgtttttgaggaatacagagattccggagaaggtctccacaatccaggtcatttgtctgatgcttccctgttctttatttcagatttgcattttggttcaccagtgacttttttctttctcggcactatgttcaactcgtgatgacagttggttccaatggtggtgatgtcagctttgatctcttgttaaatgtggcgtctgccactgtgaggctcatttccccttgtaactagtcatctgtggggaactcccatgaaatgacaatgccctgcttctgctcatgctcatgtccacggggtctagggtctagggccctttaataattctctctctctccttttttttttttttttctggagacaaagtttctctctgtcacccaggctgggctgcaatggtgcgatcttggctcaacctccacctgcccggttcaagtgattctcgttcctcagctgcccaagtagctgagattacaagcacctgccaccatgcccagctaattttgtatttttagtagagacggggtttcaccatgttggctgggctgatctcaatctcttgaccttatgatccgtccacctcagcctcccaaagtgctgggattacaggcgtgatctctctctattttttaggagacaggtctcactctgtcacccaggctggaatgcagtgagttcgtgatcattgctcatcgtaacctcaaactcctgggctccagtgatcctcccaccttccctccctagtagctgggactacaggtgtgcaccaccacacccaagctattaaaaaaaattgtagagatggggtctcgctatgttgcccaggctggcctcaaactcctgggctcaagtaatcctcccatctcagcttcccaaagttttccaattacagtcatgagccactgtgccctgccctttaataattcttgcttgaaatagttaatactgtggtggttgctaggtgctaagtttctaactcaactcctccttctgtatttatttgttggaattcttagccagaatttagcttttgctgcccaggctggagtgcagtggtgcaatctccacccactacaatctccacctcccgagttcaagcgattctcctgccatagcctcccaagtagctgggattacaggcgtgagccaccatgcctgactaatttttgtatttttagtagagacggggtttcaccatgttggccaggctggtctcgatctcctgacctcaggtgatccgccctcctcagcctcccaaagtgctgggattacaggcgtgagccactgcgcccggcctgttggaattcttctgtgaggctctgcttccttttctcacacatttattgattcagtgttgattttagggattctgactttagtttatgggttataatttattacgagcagaatttattttcactgaaactgttctggttttgaagtgggaatcccttcaagctggctgctgtatcttttagacatttttttaaaagctcttcttactttcaggtacaataagacgttccagtctcctactgtcctttccctgcccagcccagcaatcagccacttctccaaggagccctggctcccctgagtggagaatcacatttagaaaccagcatctgagctctaagcgtgctgtctcataagctatgtttgggaaagtaggctttatcctgaagacagcaaagttttaactagaggagtgatataatcattatctgcatttttaaaaacttatttatttatttatttagagacggagtcgcccaggttggagtgcagtggcgcgatctcagctcactgcaacctccgcctcccaggttcaagcgattctcctgcctcagcctcctgagtagctgggattacaggcacccgccaccatgcccagctaattttgtgtatttttagtagaggtagggtttcaccatattggccaagctgatctcaaactcctgagctcaggtgatctgcccgccttggcctcccaaagtgctgggataacaggcgtgagccaccacgcctggtcattacctgcatttctaaaagatgactccagcagctaatgtggaaaatggattggagagcccagtgtttccagaaatacagcccttcaagatcagtcatttttcaacaacatggatgaccctggagaacattatgccaagtgagataagtcagtcacaggacaaataccacatgatctcccttctatgtggaatccaaaaggttgaacccatagcaacagagagtggaactgtggttacctgagactgggagatggggcgggttgaggagatgttggttaaagggtgcaaaatttcagttaggaggaataagttcaagaaatctattatacaacatggtgcctatagttaaaaacaatgttttgcattcttgaaaattactaagcgagtagatttttttttgttccctatatcttagtgctcagaagaaagcagattttaagtgttctcaccacacataagaaaatgacaagtacgtgcggtaatgcatacattaaatagcttgacatggtcatcccacaacgtccacatatatcaaaacataatggttgtaccccataaatatgcgcaatttttatttgtcaattaaaaataaataataaaaggaaattaaaattgtatttaaataaaattttattttattaaaaatatgaatatatggcacttcatgtcccatcttgacgaattttgccgtattggtgtctttactaggatattagacacaatattttttcctttaaaatcagtctctgtgatgaagggaatttaagaatcactatcatgaatggaaacactggtttcacttaccataagtggaaaataaaaatagacacaagagaaaaagctcacaaaaatgtgtgtgtgtgtatatatacacatttttaatatatatatacacattttatatatatatacacattatattagatatgtatatatatattagacagggtatcactccaatacccaggcaggagtgcagtggtaccatcatagctcactgcagcctcgacttcctgggatcaagcaatcctctcacctcagcttcccaaggagctgggaccacaggtgtgcaccaccacgctgggctgattcttttaaaattttttgtagagttaggctctcgctatgttgcccagactggtttcaaactcctgagctcatgcgatcctcccacctcagcctcccaaagtgctgggtttatagatatgaaccacctcacctagccaaaaatatcttttaatattgattatatactgctgccagccaaggttctgagcccaagacctcttttgattttgtggagttttttttaaattttgtttcattttgttttggttcacagaagatgttggcaataccgttaaagacgttcaaaccacaccaagacattatcctttatgaaacacaaaggttcaaaacatactgaaaaggggccgggcgcggtggctcatgactgtaatcccagcattttggaaggctgaggcaggcgggtcacctaaggtcaggagttggagatcagcctggccaacatggtgaaaccccgtctctaccaacaatacaaatattagccaggcgtggtggcgggcacttgtagtcccagctattcgggaggctgaggcaggagaattgcttaaacccgggaggcggaggtttcagtgagtggagattgtaccactacactccagcctgggtgacagagcgagactctgtctcaaaaaaagagaagagaggggagagggggaggggggaagggagagaagaggagaggagaggagaggagaggagaggagaggaggggaggggaggggaggagaggagaggagaggagaagagaagagaagagaagagaagagaagagaagagaagagaagagaagagaagagaagagaagagaagagaggaagaaactggaaagggtttctttgttcttttgtgatttgagcatgacttttttttttttttgagatggagttttgttcttgttgctcaggctagagtgcaatggtgcgacctctgctcaccacaacctccacctcctaggttcaagcaattcttctgcctcagcctcccgagtagctgggattacaggcatgcaccactaggctcagctcattttgtatttttagtagagacagtgtttctccgtgttggtcaggctggtctcaaattcccgacctcaggtgatccacccgcctcagcccccgaaagtattgggattacaggcatgagccaccacacccggcgattcaagcatgacttaacgccatctgtctggcatcttaatttaatcacttgagagcagccatggggataggtcacatcctggaaagaggtgcaaaggcaagttaataattcagtgagtcattcagtcccgaatgtgagcagagagagggggcaacgtggagggagctgcaggcagctcttgggaaggtgaagtccacaggacctgggatgggattggacgcttaggcgagcaggtgagcaggagggacttggacctgagtaacttggtaggtgagggtggcctttggaggcaggcagggcagggaatctgggtgggatcctgggaggtgtccatggtcatcctcggggtgcaatggtgggctggacccgggagaaggcaaatggtttggagaacaggctgaacaggttttttagtggaggaagacaatacgacttgggtagagcttgataaagacagaagggttagaagctcatttcttcgtgagcatgcgtgcagggaaaacaagccatgaggagttgacacaagtttcagtggctgctcagaacctctgccctccagaccccacggaatttccagagtggggcagtgcgtacatccctgtaatcgaggaaggccgcaggacagtggaggcgccatctccacacctaaaacacctaagtaatattggccagtttcacacattatcaaccctagtttttcttcttaacttgcttctccctaaactgaaaacagtgggggcagtgatttgcggggttttttgtttgttttgagacagagtctcactctgtcgcccaggctggagtgccgtggcgcaatctcggctcactgcaacctccatctcccaggttcaagcgattctcctgcctcagcctcctgagtaactgagaccacaggcacctgccaccacagccggctaatttttgtgtttttagtagagacagggtttcaccatgttggccaagctggtctctaactcctgacctcaggtgatctgcctgcctccgcctcccaatgtgctgggattacaggtgtgagccacggtgcccagcagttttttgtatattaccttttcttcttcagttcttatcatggtgtcaagcacacagaaagtgtccaaagatttagccaggcacagtggcacatgcctgtagtcccagctacttgggaggctgaggtgggaggatcacttgagctcgggaagcggaggctgcagtgatctgtgatagcaccactgcactccagcctaggtgacagagtgagactccatctcaattaaaaaaaaaaaaaaaaggaagtgtccaaagaagtcggtttgccagagtgatttgcctaacacattcaggcaaagtagtgagcattttgctttctgtttttgtctcactctgttatgggctgaattctttctcctcccaccccatcaatccataggttggcatcctaacccccagtacctcaggatgtatttggagatggggtctctacagaggtgatgaaggtaaaatgaggccactagcgtgggccctaatgcaagctgtctggtgtccttataagaagaggagatgaggacacagacacacacagaggggagaccttggaggacacggagggaagacggccgtctgccagccaaggggagaggccttgggggaagccagccccagatcttggacttccagcctccaaaactgtgggaaaatatatttcttttgtttaagccacatggatcgtggggctttgttaaggcagctgggcaaaccaatatccactctgtgtttatatcaatgtgtattttcatacaattatgtacagctacaaataggaatgcactcacgcatgtttattggggcatcagtaaagcaaggaggttggagtctatgtcttcaggaactaacgggaaccttacggctctactgtagggagggcccctggctggggtaggtgggtggagagtcacagctcctgtctccacagctttccctactcacatgggcagcttttcaccttctctccccagatatgatttccatggctacagggcgatgctcaaatgagtcctcttgaagaagcaaggacaaacagcttaacaaatctcaccactgtactccagcctgggcaacagagcgagactctgtctcaaaacaaaaagcaaaggagccagcccggggatggggaggacgggggcagggcggcctcctatcccccgcttccattaatagactccctcttaccttttctttcttcagtagagacagggactcactgtgttgcccagccttgtctcaaactcctgggctcaagtgatcctcctgcctccacctcccaaagtgctgggatgacaggtgcgagccatggcacctggccctttgtgtcttgtatccaactaaaatgcatcctcagatagggtctttgcagaagagtgaaggttgtctgggtagggcctctagaaatcacccacatctggcaagggcatgacctgttctctccctgcggatgcactcattccctgaatcccgggtccaagattccctccaaagaattccaggctctgggattaaatctatgaaccatctcttaccctccaacgaaatggggtcagcacaccacacattcatcagtcaaataattatgagtgtctgtatttccctagcaagaattattgtttttgtatctttcgttttttgtttgtttgtttgtttcgagatggagtctcgctctgtcacccaggctggagtgcagtggcacgatctcagctcactgcaacctccgcctcccgggttcaagcgattctcattcctcagcctcccaagtagctgggattacccgcatgcgccaacacgcccagctaatttttgtatttttaatggagacggggtttcaccatgttggccagactggtcttgagctcctgacctcaggtgatccacctgccttggcctcccaaagtgctgggattataggcatgagccaccatgccggccaagaattctttactgggcactaaatatatgccagagacttggtggataaattcttatggaggtaagggtctggtgagggagagagatgataaaaaagtaagtgacaaggaaagaagttatctttctgaataagtcagataaaagcagtgtttaagtcaatcaaaacggaggccaggcctggagaatccctgtgcagaccacaccagcctcttgagtcacctcaaccctgctcgatttgcatacataagtgaaacttaacttgagctatttcttgcaaaggcgtacgttaaagaaaaacagtttgagctcactggaggtttaaactcttggactcaggtgatcctcctgcctcggtctcccaaaacactgggattacaagtgtgtgccaccatacccagcctccagtgaccatttacaaatttacaactcggtggcattgagtacattcacagtgctgtgcagccgtcaccaccatttagttccaaagcattttcagcacctcatgttagtctattcaggctgttacaagaaaattccaggctgggagcggtggtttaagcctataatcccagcactttgggaggccaaggtcagaggatcctttgagcccaggagaccagcctaggcaacacggggagaccctatctttaaaaaattttttaaaaaattatctggccatggtggcacacacctgtagtcccagctacccaggaggctgaggcaggaggaacgcttgggcccaggaagttgaggctgcatggagccattattgcattaccgcactccagcccgggcaacagcaacacccagagcaagcaagcaagcaagcaaagaaggaaggaaagaaggagggaaggaaggaaggaaaaatataccatagactgggtggtttataaacaacagacattggccgggcgcggtagagcacgcctgtaatcccagcactctgggaggccaaggcaggtagatcaactaaggtcaggagtttgagaccagcctgactaacacggtgaaaccccatcttaactaaaaaaaacaaaaattcgctgggcatggtggcaggcacctgtaatgccagctactcgggaggctgaggcaggagaatcgcttgaacctgggaggcagagattgcagtgagctgagattgtgccactgcactccagcctgggcaacagagcgagactccgtctcataaataaataaataaataaataaataaataaataaataaataaataaaattgttagggaaacaggagcacaggagagccagactgacaccatttttaaatcaaccccaccttaaaactagcaggggaccttccttgccagtcatgagccgtggtcctcagatgtttacagctaagggagcagctagcggcttaataatgcctgcaaggacaaacgtctaccacaacaaaatgtccagatgtcctgatatcacataacagtatttgctttaaaatgattaaatgctgagacctgggctttaaaaaaaaaagatgattatagttatgttttgatgtgctttcacactaaaatgccaaggatatcttcctttaaatcaagaaagtatttaataatacattttgtccggctgtcagcccacctgcctgcagacatagcttagcttttagacaaggctgctacatcagaagagtttaaaacaaagacagcgagttccttctcctgttttctgaggacgccctgccgtgtaactgagcagctttcaataaacaatctctgctcactgcactctgagattcaccttgaactttcccaccacagatccacgaacactttcttggggtctggatcaagacccctttctctggcaacaaaatcacacagtgtgtactccgttgagcccaggcgccttgagctcacaatcatgtttgtgaaatcgatgcatgtggccgggcgcggcggctcacgcctgtcatcccagcagtttgggaggccgaggcgggcggatcacctgaggtcgggagttcgagaccagcctgaccaatatggagaaaccccgtctctattaaaaatacaaaattagccaggcatggtggcgggcgcctgtaatcccagctactccggagactgagacgggagaatcgattgaacctgggaggcggaggttgtggtgagcctagattgtgccattgcactccagcctgggcaataagagcaaaactccatctcaaaaaaaaagaaaagaaaagaaaaagaaattgacgcatgcgattgtgtgtgactgtggggttgttccacgtcgttgggaccgtttgattcattgtgtatctttccccggcatgaatgtattttccatgtatttatctgctctacgtcacagatactcttttgaggactagtgatctcaaatccacagtgttgattctttacattttatacacctgtgtcacgaccagcggataaggatacagaacatcccagcaccccaccaatttccacccacctctccccgtgctgtagccctttgctccctcagcaccagatgcaacgtctttctgatttctgtcgtcactgattgctttgcctgttctaggacttcctctaagtggaaacatacgctatacatacactatacgtacttttgtgtctggcttcatctgctccacgtggggtctgtgaggttcagccctgtggttggctgcagccatgcatccttccttcgcaacgccctgtagaatctcatgggatggacacgctacgcatttgcatatccatcctactgtgcctagtcctgtgagtactttccaaatctgctgagtgctccttttccaacaaatattttgttcggacccttttgaccttcctgaagtgaaattcatagatatgaaaatgttctgaaattttggccgggcgcagtggctcacgcctgtcatcccagcactttgggaagccaaggcgggtggatcacgaggtcaggaattcgagaccagcctggacacatggcaaatccctgtctctactaaaaatacgaaaattagctgggtgtggtggtacacacctgtaatcccagctacttgggagattgaggcaggagaatcgcttgagcccagggagcagaggtcacagtgagccgagatcatgccactccgtcttaaaaaacaaaaatggccaggtacagtggctcacgcctgtaatcccagcactttgggaggccaaggtggatggacctgaggtcaggacttcaagaccagcctgtccaacatggtgaaaccctgtctctactaataatacaaaaattagccaggcatggtgacacatgcctataatccgcctactcgggaggatgaggcaggagaattgctggaacctgagaggcggaggttacagtgagctgagatggcgccactgcactccaacctgggcaacacagcgaaactctgtctcaaaaaaaaaaaaaaaaagatgttctgtaaacataatgtaaaaacttacctgtaatttaaatcagaaataagggagacatactctattataaaacaatatgtaatttagtcaataaatgctcagttatgatcactgtagaagatatgatgaagccaggcacagtggctcacaccaattatcccaggactttaggaggctgaggcggaaggattgcttgagaccaggagttaagaccagcctgagcaacagagcaagaccccatctatacactaaatatttttaaaatattagccaggtgtggtgatgcacacctgtagtcccagctactctggaagctgaaacaggaggatcacttgagcccaggaggatgaggctgcagtgagccatgatcgcaccactacactccagcctggatggcagagcaagatcttgtctcaaaaaaaataaaaataaaaaagatacaatgaagcaattagatgatgcttccatcagtggtaatgaattgttggctattatttgcatgtgtgtaaatctctgtatatatgtgagaataaatccatatatatttatgtgtgatacatatgtatgcattcttgtgagtgtataagaatatatttgcacagtccaggagcagtggctcatgcctgtaatcccagcactttgggagactgaggcaggaggatcccttgagcccaggagtttgaaagaccttgtctctatcctaaaagataaaaaagaagatattcagccgggcacggtggctctcacctgtaatcccagcactttgggaggccgaggcgggtggatcatctgaggtcaggagtttgagaccagcctgggtaacatggggaaaccccatctctactaaaaatacaaaattggccaggtggtgggcatctgtaatcccagctactcaggaggctgaggcaggagaatcgcttgaacccaggaggcggaggttgcagtgagccgagattgcaccacttcactccagcctgggcaacagagcaagactccatctaaaataaataaatcgcgtccttttagggaataccagggggatgtatcccaagggtggaagccctgctgaggttttccagggtggtaggaggtgggtcggagtctctgcagtgccccaggctgtgaagcttgacttcaggtgtccaccagagtgtcctgttcttttgtcaaacaccagcctcggtgtcactgggaaggtatttttcagatgagattcacatttacgatcacttcaatcaagtaaatcaagtaagagagtgtgccctccacaatgtggtgggcctcattccgtcagctgaaggttgaaagagcaaaaactgtggtttcctggaaagaaagaaattctgcctgaaggctgtagtcacatagaaatcctgattgaacttctagcctgccagcctgctctacagatgttggacttaccagccccacaatcacaggagccaatttcttaaaatacatgttgatagatggatagatggataattatctttctatagatatagagatatagagacatgtacatttccttctccaagggagaccaacatccttggagaggctctctctctctctctctctctctgtctctctgtctctccaggtcaccattaatatagacagaaaacctattcagaaagagagataagtatgtagaccatattttttgagccctgtctctctgagagagagagagagaacctattggttctgtttctctggagaaccctgactgattacagaggcctaagttaacagtgatctggtctagggcagataaatacaaatatgtgcacgatatttttgagaaatatgtaggcaacaggggaagataaagttgactccacgggacttgcagagaggggagtacgtgaggagttactcgtaggtttttgtcttcagaactagacggaccttgacagcatttgctgagacaggcaagccttaaaggcaagagagagaaatggaggtggttcctgtaaaaccatctgcagggtatgtgatgggggcactgggaaaggagaaggaacaggagaggaattggtaagaggcgacgtgaaaagaataaaagtacagagaacttgtgctcaaggagaaagagcagctgggatgtttaccatctctccagcggccagatgaaacctcagctctcaagtccgcaacggaattttccaccaagctaaaggccaggaggaattccaagaattatatacatcaccgtgtaattaaggatgggaagatttttctcttagacactaaacaatgtggacagtgttgcagagacgtctgtttaaaatcacatttctctaaatagccatctgtttcacagattattcctggattcagtcctccacaattttcattcaaattttgagagctgacaacatttaattttataatctgcaggttttgtgtctttacaagtttttagcgtagtgtctggcacacaataagggctcagtggaattattgtgaaatcatatttcctgacatagtcaataaaggaacaaaacattccacattacctaattcgtactctcttctttaaaaatttagagatgtattataattatataaattaaatttataaatgtataatttataatttatttatatattatacatttataaattatatattatgtaacatatattaaacataaaaaaattaaatacattatatataaagatgtactgggcttggtggctcatgcctgtaatcccagcactttgggaggctcaggaggttggatcgcttcagcccaggagtttgagaccagcctgggaaacatagcaagatcccatctctacaaaaaatacaaaaattagccaggcgtggtggcacacacctgtagtctcatcttatctactcagggggctgaggtgagaggatcgcttgagcctgcgaggtggaggttgcagtgagccgtgatcgcaccactgcactccagcctggatgacagagtgagacgctgtctcaaaaaaaaaaaaagccatattgataaaattataccaagatatatttaaatacagaattaactgtgtatctatactttatatacatgtatgaatatatttgaacattaaattataattatgaacataaatttgcatcatatattctacttatgtctccctgggcacatgtctgtatgtgtatctgtggacacacgtccatgaagaaattggatgggatgaactcgggagtaagttaactctgtctgcgtcctgtgcacctgatgcagcaataaatactccatcaaaggcattgcatttcccaaaagcccgtgaggcaggcgtgattctagtgtccattttacagagaagagtactgaggtgtggagagactaagtcggccagcagtgaacaccctcagccactgctcggacagctctcgctcacctccctgcatctccggctccagacgccatggtctccatcactctccctcactcgggatctcatgccggctcccggcttggatcacagacgctgatggctcaaaaacgtgtgtctgggttagagaatccacctgtctcccttagctctgcactggggttgcccaatttaataaataaaaatacaaattgcctggttaaatatggatttcagataaacaataaaaaagaatcaacttttattttagaatcgacttagatttggcgaaaagttgcaaagagaatagaaagttttccttgttcctgcacccagcttcccctgttagtagcgtcttacacgagtatgatttatctcaatattagtgaactggccaggcacggtggctaacacctgtaataccagcacttttggaggctgaggcaggtggatcacttgaggtcaggagttcgagaccagcctggccaacatggtgaaaccccatctctactaaaaaatacaaaaattagccaggcgtggtggtgagcacctgtagtcacagctactcaggagactgaggcatgataattgcttgaacccaagaggcagaggttgcagtgagccaagattttgccactgcactccagactcggcaacgagtgagaccctgactctaaaaaaccgtaaaaataaaaataaataaataattgccaagtgtggtggctcatgcctatctataatcccagcattttgggaggcagaggtgagcagatcacttgagcccaggagttcaagaccagcctgggcatcatggcaaaaacccttctctacaaaaaatacaaaaattagctgggtgtggtggtgcaggcctgtagtcccagctactcgggaggctgaggcaggaggattgctcaagctggggaggctgcagtgagccaagacagcgccactgtactccagcctgagccacagagtgagaccctgtctcaatagaaaaacaaatacataataaatacataaaacgcccatggcagggacacacacgctggtttgggttggagccagcccgtaaacccaaatttgggggcccgggctctcggctgctgcagcactgactaccgttaaggtacaataaaactgacacatgggcagtgaggggaatttgctctcctgcctccctccctaagttcatctgctgagaaaaatgctttgagataaacctggagccacagctctctgcacagtcagatcgcaggaacgcggcctagctgcttcagccacgttctcgcggcgccacctggtggccatggaccgccatcgccgctggacgtcagggccgccaggcccagcgagatgtcacctcctctgaggagccttccaggatcgcacccggcacgcgctccacgcctcgttgtctgttcttcggagcaccgaccatgatcacaaatcagctcgctcgctgtgtttcctgccgggtcgctaccgccatgatccgcacgtagtggtcaaggctgaggttgtatgaatgtggacgttataaccctggctccctctccctccctatgctgggctcccctcgatccccaggcggtggggtgcccctggtttttcctttttaaaattataagtctggccggacgcggtggctcaggaccgtaatcccagcactttgggaagtcgagggagggtgtatcacttgaggccaggagttcaagaccagcctggccaacatggtgaaacaccatctctactaaaaatacaaaaatttgccgggcatggtggtgtgcgcctgtaaccccagctacttgggaggctgaggcaggagaatcgcttgaacctgggaagcagaggttgcagtgagccgagatctccagcctgggtggcagagtgagccttcgtctcaaaaaataaaaaataaaaaaaaggttaaatcaatttaaatgtcaatgtccacaggagctacagatggtaccaatagctcccagctggggctcgtgtatcattggtcagggcttcatcaggattggctactgccccacccttgttaaacatttttaatatcttccttgtctaccagggtcaggcacctcaggtagatgaatgaaggatgggggggatgggggagggagatggaagagggaagggaagcagagggaggaggagtgagtgggcagccctgatcggaggtccctccccatcccatctaaaggggctccctggccgggcgcagtggctcacacctgccatcccagcactttgggaggctgaggcgggtggatcacctgaggtcaggagttcaagaccatcctggccaacatggtgaaaccccgtctctactaaaaatacaaaaagtagccgggtgtagtggttcatgcctgtaatcccagctactctggaggctgaggctggagagtcgcttgaacctgggaggcggaggttgcggtgagccaagatcgccccactgcactccagcctgggcgacagagcgagattccgtctcaaaaaaataaaaaattaataaaataaaaataaataaataaataaataaaggggctccctgctcttctgctccaacctgtggctgccgcataggaacatgggtcacaaaacccagaaatctggattcctttaagtgaaatcttccaaattttatgtttaagaaggtcatgtatttattccttcctaaagaccatgctgaccaaatcaaatgagtctgtggataagtgtgtccaggcttcagactactcccttttggagcctgtggtgtaaagggaacagcttaaagtccctcgccccagtcaacaggggaatttaatgtcttgggttccctggcagaacttttctgttttttttttttttctctttatctaacacttccatgtgtcttactgaaagccagctgcagagttagagcagcgtttggcagaatcaaatatggactagcgcttgcttctgtacggccctcaggttaagcatggattttatatgttcaaattgttgaaaataaatcaggccaggcacagtggctcacacctgtaatcctaactctttgggaggtcgaggcaggagaatcgtttgagcccaggagttcaagaccagcctaggcaacatagtgagaccccccacatctctacaaaaagttaaaaaattggccgggtgcggtggcttaggcgtgtaatcccagcactttgggaggccggggtgggcggatcacctgaggtcaggagttcaagaccagcctggccaacatgatgaaaccccgtctctactaaaaatacaaaagttagctgggcgtggtggtgaatgcctataatcccagctactttcgggaggctgaggcaggagaatagcttgaactcgggaggcagagtttgcagtgagccaagatggcgccattgcactccagcccgggcaacaagagcaaaactatgtcttaaaaaaaaaaaaagttaaaaaattaactgggtgtgttggcacttacctatggtcccagctactcaggaagctgaggtgagagggtcatttaagcccaggagatcaaggcttcagtgagctatggttgcaccactgcattccagcctgggtgacagaacaagaccctttctttattcaaaaaagagagaaaagaaaaaagagagagaaagagaacagaaaaaagaagagaaacaaagaaaagaaaatgatatttcataatatgtgcaaattatatgaaattcaaatcttggcttccataaacaaagctgtgttggcccatggtcacgccttcattgacatcacctggtggcagctttgtgttacatcagcagagttaagtagactgtgtggcctgcaaagcctcaaatacttgctgttctgggccaggcgcggtggctcacacctgtaatcccagcactttgggaggccaaggtgggcggatcacccgaggtcaggggttcgagaccagcccagccaacatgctgaaaccctgtctctactaaaaatacaaaaaaaaaaattagctgggtatgctggcaggtgcctataatcccagctactcaggaggctgaggcaagagaatcacttgaacctgggaggtggaggttgcagtgagccgagatcacaccactgcactccagtctgggcaacagagcgagactccatctaaaaaagaacaaaaaaaattgctattctggccctttcctgggggcatttagagaaaatatttacccacccttctaggtactttgcgtgcattaacttatttcatcctcacagagcatctatgatgaaggcgctgctattatcccatttcaaaggtgagaaaagtgagtacgaaaggtgaagtccatggagacacagctgtgtgaggcagagccaggatttaggctcaggaagcctgaacctagattctagggtgttaactgctacatgaggctgcctctctttctaagcattttcacttgtgtttctctccacatgctatgttctaccataaattggcttccttgaatgggagggccacactgaatcccactgtctctacaactgtgacatcatgtaatgctgactcctttagctttattaaactcaggttctaaccttagccacaggctctccttctgccaagctgtcagctaaatcaaaccatgctctcttatccccagcctgctcctgccttcatctccctcgttttctttttaaagattaattatttttaggctgggcacagtggcttacgcctgcaatcccaacactttgggaggccaaggcaggcagatcacctgaggtcaggagttcgagaccagcttggccaatgtggtgaaaccgcatctctactaaaaatacaaaaattagccgggcatgcggacaggtgcctgtaatcccagctactcgggaggctgaggcaagagaatcgcttgaactgaggaggtggaggttgcggtgagccgaattcatgccattgcactccagcgcctgggtgacaagaatgagactccatctcaaaaaaaaaaaacctgtcatattggattagggtctaccctaatgaccttgtcttgccttaattactcgtctaaagaccctattaccaaatacagtcacatttctaggtgctgggagttaagacttcaacatgcatttggggggacaaaattgagcctataacaagctaattacttaatgttttctgggagatgcctcaacctgtcccaaacgaagcttatgacatcttcccctcacctgctcaccttccagagttgcccatctccaccaatggcaccattatccacctggttacactgaccagaagccaatggcgcccttctcattacccctctcatcggtcaccacgtcctgccgtttgacgctgatcaacctgctcatttccccccatctcctctgccgccactgaaaaccaacccaccaccgtcatctcctgcactgcggaaagttctaaatatccccatcccggacccaaactgcctctcctcacccaggaatcatttgatgtggtcagagcgagattcaaactcctcccaactcctgaaactgtcaaagctggacttgaatacggagcagagccggcgtcctgttggagtgcttgtgagctcaccagtgctccctccctccaccgtcactctaaatcaggactacccagcctggcaccctcagcatttggggttggaggattctttgctgttgggggtgggggaaggggttctgtcctgtgcattgtaggatcttaagcggcatctctggtctcaccaactagaggccaggagcagcccctcacccagctgtgaccatcaaaaatgcctccagacactgccaaaggtccaccggttcggggaagaaccacctctgattgagaccccttccaccatcccgctctaaataataatgatttctcccattatgcagagaaatactaaagtcatccacatagggaggtgagtttaaaagcccatcaggacatgtgcattttactaagccattaatgtccctgcgatttatgagagaacagtaactgcattccggaagacacaaatggctccttccacgatttcattatctgccttgcatgagtgagcctgagtttctgtagcagttgccacgtgctgccactaggtggtggtggaagccaagtcataaagtagtttggggcccttttctgttgctttggttttggggggtttggttttgttttgttttgttttgttttgtttttcgttttgagttttgctgtagccaggctggagagcagtggcacgatctcggctcactgcaacctccacctcccaggttcaagcgattttcctgcctcagcctcccgagtagctgggattacaggcgacttcaccatgcccagctaatttttgtatttttagtagagacggagtttcaccatgttcgaggccaggctggtctcgagctcctgatctcaggtgatccgcccagctgggcctcccaaagtgctgggattatgggcatgaaccactgtgcccggcctttttcggtttttagatctttattttaaaattgacaagcaaaaattgtatatatttatagcatgcaacatgatgtttccatattcttatacattgtggaatggctaaatgtagctacgtaattttctttttttctttttttttttttaagacggagtctcgctctgtcgcccaggctggagtgcagtggcgcgatctcggctcactgcaagctctgcctcccgggttcacgccattctcctgccgcagcctcccgagtagctggggctacagatgcctgccaccacgcccggctaattttttgtatttttagtaaagacgggttttcaccgtgttagccaggctggtctcgaactcctgacctcgtgatccgcccgcctcggcctcccaaagtgctgggattataggcgtgagccaccgcgcccggccctgattttctacatagctttttttttttttcttttgtggtgagaacataaaatctactctgagcaattttcaaagacactttattttttattttatcttttctctcaaattcgtcgctagtattacttgagtagtttctaatacagtcatgtgcctcatagccacgttttggtcaacaacgagccacatacgtgatggtgggcccgtcagatcataatggagctggaaaagccctaccgcccagtgatgcggtagccaaagtaacatcgtagcacaagtactgtacttttaaaatataacttcagtgtagcctaagcttagagtgttataaagtctacagcaatgtcccaggctttcacattcactcactcacaccacccagagcaacttcccatcctgcaagctgcattcatggtaagtgcactatgcaggtggaccatttttttaatccttcataccacatggttactgtacttttttttttcttttcttttttttgagacaggatctcactctgtcccccaggctggagtgcagtgacacgatcacagcttactgaagcctcgacctctcgggctcaatcgatcctcccacctcagcctcctgagtaagtagctgggactacaggcatgcaccaccatgccaggctaatgttggcggggggcgggggatgctgggggggtggggtgtgtgtgcagagatggggtttctccacgcccccaggctggtctgcagctcctgggctcaaggaatctcttcacctcagcttcccaaagtgctaggattacaggtgtgagccatggcgccccgcattactacacctttctcaggtttaggtccacaaatactttcctttgtgttacaaccgcctgcagtactcagtacagtagcctcctgcacaggtgcgaggctaggagcagcaggctattcatgtagctcaggtgtgcagcaggctgccccatctgggttgctgtgagtcactctagaacattctcacaatgaggagatcgcctaaggatgcgtttctcatactgtgtccccttcgtccatcgaggcgtgactgtacctggggcctcagagcacctgcagtccccccaagggccaccttcctgagaccacagtctgggcagccggcctccctgcatcccggagcgcactggggatgaggactcacccaggagagcccgagacacctgagcggccggcacaaaggccctagggaagtgtgggggtacccttggtctcaaagcgctgatccgcctgtgccccctgacctgccagggccggcccccgcttgggtcttggagggcgctgcgcaagcctgcgccccgcactcgcccgggaagggaagggcagggaaggggcgcgcacagcctggcacctgctgtgcaccaggggagacgcgcggcgctccaggtggagtcggcggcggccgagctgcgcggggctgtgcggggctggattctagcctgcaggacgcgaaaacggcctgggtccggcttcctcctcccctgaagcagcgaaggggcgtcactggcgcgctgttaaacgtcttcgccatcggttccctgcatcctccctcctgcctgggtagccagctcctgggcgcgcccaggcgcacacgcttccctcgctcctcctgcagccacaacgcccccaccccccccgcccgcccgccttgtgcggcagcggtgaccgccttctcctgctgccaccccctccaccccctgttcaaggtctgtcaccgtagggggcgggggggcgcgtggagccgctgggggttcggcccaccccgcgaaccgagctcccggccctgtgcgccctcagctctgccgcgggcgttggcctgggcgggcgcaggactgcctggtcgccctggagctcagggtcggggccccgcgtttaaccaccaggcggaggcgcaggcggagcccggagaggacgcgacccctctgggcggccttgggcccctggacgtgccagactctggacccctgcgggggctgccgtggagagcagaggcaccgcgtcctgcccagagctccgataggcgggccgcgttgggggattgtgggggccggcgcgcaggggaaccgtccactcccagggtggcaccaggatgtgactatttccatacccaaatgagggttggatttccatctcctaatatttccacagtttgggggtttcctcaccaacttgtctgacatttctcggccttccttagtgatgacaacactaccgttggttaattttcttcaaaatgtgtgcaaaccacttcatgtatctgtagttaaaatatggaaaggagacatttaatttcttctctttttatttatttattttgattttttaattatttatttatttatttatttattgagacggagtctcgctctatcgcccaggctggagtgcagtggcgcgatcttggctcactgcaagctccacctcccaagttcatgccattctcctgcctcagcctcccaagtagctgggactacaggcgcccgccaccacgcccggctaatttttttgcatttttagtagagatggggtttcaccttgttagccaggatggtctcgatctcctgacctcgtgatccacccacctcggcctcccaatgtgctgggattacagccgtgaaccattgtgcccggccaagacatttaatttctatagcattttatgaagaccagttgctgctgaaatagtctgcctccccacacgcccctcatcatgtttataatgttttcacaaggctcttttctccagatcattttcaacttatttctaacatattatgtgaactcgacacaatatttattttgtttcctccaataatgtagagaccatactttttggttatactcattcctaagcactttacattttattaaactatttgcatggaataatttcccatttcattctaattgtagttattctggaatattatttatttaagtgttattgattaaaatatattcctgtgtgcttggtcatattactaaatttatgacttttcaattattatttcttgtttctttttggttttctaagcagtcatttcttctgtaaatattatgacatatctttcttcctgtccactaggtatactggactttctagtgatatgaaccaataaactttctattgtggcttatatcagtttgtgtgttctgtcatttccaacacaaagaatcttaaccgatacagatttagaagagaaaaagtttcaggcctgtaatcccagcactttgggaggctaaggtgggaagatcacttgagcccaggaatccaagaccagcctggacaacacagtgagaccctgtctctataaaataaaataaaataaaaattagccaggtgtgggtgtgcgcctgtagtaccagctgcttgggagactgtagtgagaggctcgcttgagcccaggagttcagggctgcagtgagcatgattgcactactgcccaccagcctgggtgacagagtgagaccctgtctcaaaaaaaaaagcaagttttagaagcattcttgctaaagaaattgtccctagaaaagtatttattcactaaaatgaacgacttttacttacttttacaattttttataagtcagagtaaaatttaaacacatcgatatagttcatgaaatgattcccctgaacctgacatatactagctttcttcttagagcctcagtgcctaggcagaaacttggcagttcctgagatgacactgtagatatagggagggaaaaagaagaggaaagcaaagcagatgagacagaaaagataacttagtaaggaagttctgtgaccataaaatagtgttcattgttctgaacatcattcaaaaaaaacaatactcactttgggaggctgaggcgggtggtcaggagttcaagactagcctgatcaacaagatgaaactccgtctctactaagaatacaaaaattagccaggcttggtggtgtaatcccagccagcctgtaatcccagctacttgggaggccgagacaggagaatcgcttcaactcaagaggcggaggttgcagtgagccgagatcacaccactgcactccagcctgagcaacagagggacactccgtctcaataaataaataaataaataaataaataaataaataaataaaatgtaaaaggaagattaaaaattcctcttgtgctggaataaaatgatatagatacagaagatgacaactctgaaggataagacctgtgacccataaaataacttttattttatggtcatttcaacttatgaccccaaacatcatttaaaataaatatttagaacatgaaaacaattaactttttaatgaatgaaatgttcttgagaaaactgatcagagccagtgtagtatgcatcggtgcttcatcgtgatctatgcttatgaagattcagttctgcttttacataatatcaagcgacattgtagtaagaaaacaattaacattttagtttgtattggattaggcatttttaaaatgagatactcacacaactgctaacaggaatgcaaaacatctccatttctccactgaatcacctttacatgtaatgttctaaataaataataataaaaatatacacatttccttctgatttcttaaaaatcaacgtaagtattcattggccaggtgtggtggctcatgcctgtaaccccagcactttggaaggccaaggcaggaggatggcttgagcccaggagcttgaaaccagcctgagcaacatagagagaccctgtctttaaaaaaaaatttttaataaaaataaaggtagatactcatctaactgctagaaaaaactaaaaagatgtcataattgaccttatataagttgtatacaatatgagatacactatttaactgcatatattattttggcgggtttttttttgttttttcttacttttttatgtttaaacttttatattatacaaaacacagccctaacataagttttttctcatcttttttttttttgagacagtcttgctgtgccacccaggctggagtgcagtgctatgatcatggctcactgcaacctccacctcccaggctcacgtgagcctcccacctcagcctcccaagtagctgggaccacaggcacatgccaccatgcctggctaatttttttgtattttttgtggagatgggattttgctatgttgtccaggctggtcttgaattcctgggatcaagtgattggcccaccacagcctcccaaagtgcagggattacaggtgtgagccactgcacccagccagttttttccataaacctttaataataggcttttaggtctagaaagtaatttctaatataacagagtttgaaaatgtataagttccattaaattaaatttaatttaatttaattaattaaatttaatttaaatttaattaattaaattaatttaaatttaattaattaaattaatttaaatttaattaattaaattaatttaaatttaattaatttatttaatttaaattaattaattaaattaatttatttaatttaattaattaattaatttaatttaatttaattccaattaattaaattaattaattaaattaatttaaatttaattaattaaattaatttgaatttaattaattaaattaattaaattcaaattaatttaattaatttaatttaattaatttaattccaattaattaaattaatttaaatttaatttaattccaattaattaaattaatttaaatttaatttaattccattaaattactaacatataggctgggtgtggtggctcacatctgtaatcccagcactttgggaggccaaggcaggaggatcacctgagatcaggtgttcaagaccagcctggacaacacggcaaaacgctgtctctactaaaaatacaaaaattaggtggacatggtggcaggcacctgtaatctagccacctgggaggctgaggcaggagaattgcttgaaccggggaggcataggttgcgtcgcagtgagttgatatcgtgccattgcactccagcctgggcgacaagagagagactccatctcaaaaaaaaaattactaacatataatatgaactctttagtttctaataaatattgagctaattttgaaggcttgactcacaaaattttttgcctatatgagttcttgcacgttcactaagggatgaaatgtgagcaaaggcttttccacgcttattaaatatatagggcttctcttcagtatgagttctctcaaatagagtaatggctaaactattttggaaggcttcctcacatgcattagagacataaccatttctctccactatggatttcctggtgttgaataatgtcagtcatgcaacagaatgcttttccacatgtattatgtttgtggggatgtctcttcagtgtgagctctagtatgttgccttaaggaggaaaactcactaaaagccttcctacattcagtactttcataggattttcccctagtgtcagttttttgatgtaggatgagctgggaggtcttgtttcttgttgctttatcacattttttacaatcacaggttttctttcctacatcagttctgccatgctgcaaggaagctgagctgcatttgacggcttctccccattgcttgccttcacagggcttctctcctgggtgagttctcatatgtcgaaaaagagatgaactatcaataaagcctttcctacattgactataatcataaagtttctctccaatgtgaattttccagtgtataataaggtgtgcttttctgctacaggctttcaggcagagagtgcattcttaggattcctcacctgtatagaatcttatgtgtctagcataggatgggcaatcagtaaagcgttcctcacactcattgcatccacagcatttgtctttagtgcatattctttgatgtccaattaggtataaattctgcctgaatacctcctcacattcactacattctgacttgtatgaattttctcatgctttatttaagatgaattataactgaatgatttttcatctccattaaatccataaaggttatttcttctataattaagtaaatcaaaattatgcttcaagccccctccacttaacacatgctcatggagtttttgtcttgaggggatactgtttacaaaagcctcacgttcacagactttctgctcagtacatgttttctcatagatgaaattaatttgatttggaagtctctccttgaccaggcatggtggctcacgcctgtgatcccaaccctttgggaggccaaggcaggtggatcacttgaggtcaggaatttgagactagcctggccaacatggtgaaactccatctctactgaaaatacaaaattagccaggcatggtggtgcatgcctgtaatcccagctacttgggaggctgaggcaggagaatcgcttgaacccaggaggcagaggttgcagtgagccgagatcacaccattgcactccagcttgggcaacaagagaaaaaccccttctcaaaaaaaaaaagaaagaaaaagaaaagtcgctcttcattttcttggtgcatctctatttggttaccagcttcctagtcatttcctaaaagggaagagagaatttatcacttgtgaatcttcccattatcacactgtggaattaaacttctttacacataccccttggtgggtatatactcttattttgtcccatacatcatattttttttacttattggtttttacatctgactttcattaactgcgggcactttagagaccaggatcttagctctagacttcagggttttttttcttacttctgttttcctttgctgacaaccacgtacaataacttcgctcttcagcacaaacctacaatttctctagcccacaaaagcacagcaaatatgaaagatgaagtaaatgccagcttggcacccaatctcatgtcacttggatccacaccatgcacttaataatacacttttttttttgagacaaggtctggctgtatcactcaggctgattgcagtggcacaatcgtggctcactacaacctctgcctcctgggcttaagtaaccatcctcccacctcagcttcccaagtagctgagatgacaggcacgtgtcaccatgcttggccaaggtatttccaacaaataaccttctgctccattcaaaccagggtgccaggctcctcagcttgcagacggcctatagtggaaactcaccttgtatgcgtgtgagtcaatgccccttaataaactcccttttatatatacatctaccatattagttatgtccctctagagaaccctaatacacaggcaaatgatggagctcttggtcttgttcagattcagttccataaacaatatttcagactctatgagtgaaacatgcacagtgccaacccctcactgatcatcagggatgtgtgaccttcttgtgccctgtttgccagatgctcaggggctcacctggactaccctgatatggggttcctgtccccaacatccatggttcttctccccactctaaatgaaagatcacatatgtgccaggtacagtggctcacgcttgtaatccctacactttgggaggccaaggcgggcagatcacctgaggtcgggagttcaagaccagcctgaccaacatggagaaaccccatctctactaaaaatacaaagttagccaggcgtggtggtgcatgcctgtgatcccagctacttgggaggctgaggcagaagaaagaagaagtgcttgaacccgggaggcggaggttgtggtgagccgaggtcatgccattgcactccagcctgggcaacaagagcaaaactccatctcaaaaaaaaaaaaaaaaaaaaaaaaaaaagatcacacctgacatgggaacaggacaccatttttatgggaaatgctggggtctgggggttacaaactggagacaaagaccaaatttctattaacagtagtcctcctgctgtacattagatctctagatttattcatcctacgtaactgcacttctgtaccatttgaccacatctccccgcttcctcctcctccccacccaggtaaccaccattctgtatttgatgttgttgttttttaatttcacatatattcagacaaatttgagtttaaaaaatttttttaattttcacatgtaagtgaaatcatgcaatatttttatttctgtatctggcttatgtcacttatcatcccttagtataatttgagtttcataggctctcacctcattaaaatggcactacagaatcttgtcaaataaatatatctttcaggcactggaaaagtctcagaaagaaaagatatcctctctcctctttagctatagttcaataatacgatttaaataatccgatctgataaggtatccaatgaagaacatttatgggaccataaacttgttcttctctccaaaattcagtgaatatttgtaattgttagcaatctgttatgctctccactaatataaaccaactcttaaaagttattggaacaaaagaaccctgaaaagcactcagtctccagaaattgttgcattaatcattctcattaggtgccttactcaacaatttgttgcctgagttataatcacatccttgaatttccaacatattaacactttaaatatttctttatctcatcacaagatcagcactttcctctcctctgagaagtatgaggtagcaatgtcactgatttttattaaatgttttggagtcttgactcacttaaatgcatattatgtgccaaaatgtgacaggaaattaaatgagatgccaggcatttcagaggaaataaagaaaagaaaatcaagtttaacaaaaggaagaagggtgtccaatagtcatccttaaagaaagcacatttacttatgtatatctaaaggtgtaagggcatggggctgagagccaggttgacaaaggctagaggacagagaatcagagaaatcatccaaaaaagacgagcaagatgatccaaaggacagcgggctggccaccacatcttctaaagcccaaggcaagaatgaccgtggactccatttttaagtccactggtctatctctagtggacaatccagcagtacctatcaaagcttcagcaagtctacctctaagatccacctctactgtctacctctaagcaatcctctaagtctacctctactgatccagcaagtctacctctaagaatgtatcccaggatatacttgtgaagatggaaaaggactgagtattatgattaattactgaagaatggtttctaatggtaaaagattggaaacaacctaaatattcaccaagaaacatctggctaaatctacggtctatacacacagggacattgtgcagttatcataccacactttgtatgtatactatgatgtcaaagtcactcacggttaatgttctttttcaaaagaacattagaggtagattttctggaccagtgtggatctgaaactttaacagatactcccagatttcccactagagataaattggcagtcttaaaaatgggttcacggtctttcgtgcctttggctttagaagacacggtggccagcctactgttctttggatcatcccactcatttctgttgggtaatttctctaatttttcctcctctggctttcttttagcccctttatttatctaagttaaaatttcaaatatttttccaaattaccaaaaataattccattaagaatttgattgagactgggcgcagtggctcacacctgtaatcccagcactttgggagactgacgcaggtgaatcacctgaggtcaggagtttgagaccagcctggccaacatcgtgaaaccccatctctactaaaaatacaaaagttagatgggtgtggtggtgcacacctgtaatcccaactacttgggaggctgaggcaggagaattgcctgaaccagggaggcggggttgcagtgagcccagatcccaccaatgtactccagcctgggtgacagagtgagactctgtctcacgaaaaaaaaaaaaaaagaatttgattgagtgaaaatacctgggcaggagagacactccattctttgtgcctttgatgctctattgtacctttttcttttcttttcaagacatggggtctcactatgtttctcaggccggacttgaacttctgggctcaagccatcctcccacctcagacttctaagtatctgggactgcaggtgcaagccactgcacccaactcttaatgtaccttttacacacatttgtgtcacaacacctgtgccacacccttaacagttttgcagatgcacatcccaacgtttttcagttttgagaaaaatcacttttatttggtaaaaatcacacatgcttatgaaaataattacacattgcaccaaagtgacaaagatgaaagtaatcactccagatcctagttccgagaggttactatctttaacagtaggcaaataataaaatcccaggttttttgttttttcttttgagacggagtctcgctctgtcacccagactggagtgcagtggcacgatctcggctcactgcaagctccgcctcccgggttcaggcgattctcctgcctcagcctccccagtagctgggactacaggcgcccgccaccatgcctgggtaattttttgtatttttaatagagacggggtttcaccgtgttagccaggatggtctcaacctcctgacctcatgatccgcccacctcagcctccaaagtgctgggattacaggcgtgagacacggcgcctggccaatcccaggtattttttctatgcaaatatacagaaggctggatggataaacagataatacatgtaaatacttaaattagaatgtggcccaggagaacatgaactccatgaggtcagggatttttgttggctaggttcacttccacatctcctgtacctagagtaaggtttctcagcctgggcactactgacatttgggctggataactctttttgtaggagattggggtgggtggggagcgtgccatccactgcactgtaggatgctgagtagtgtccttggcctctaccctggcagaagcatccatgtgacaaccaaaactgtctccagacattgccaattgtcccctgggggcaaaactgccaccaagtgagaatcactaacctagaaaagtgagtgttcaatacacaataagtgcttgttaaatgtattacacaaccggaaaatgatgtaagggcaagttaaaaagtaatgcaaactggccgggcacagtggctcatgcctgtaattccaacactttggaggccgaggtgggcagatcaccttgaggttgggagttcaaggccagcctggctaacatagtgaaaccccgtctctactaaaaatacaaaaattagccaggcgtggtggtgggcacctgtaatcccagctactagagaggctgaggcaggagaatcaattgaacccaggaggtggaggttgcagtgagcctagatccccgccattgcaagtcagcctgggcaacaagagcaaaactccatctcaaaaacaaacaaaaaaaaaagtaatgcaaactcatctgggttttggtcatgtcctgcatctcctgaggaagggcagagggctgaggagcagtccttgggaagcacaaacatgtgagaatccaggttggctctatgccctacccagtaacgtagccccaaatctctgccttagctgacatgggggcacactgaagtcttgtgaagggtagaagggaccatgttgaggcagggacaaccttgcctacaggtgattcaggtaatcccacaagttcagccacagaaaacaagcatgaccatgtgcaaagacttccacgagaccacttgtcacagggttgttttaattcaagcaacatcaacatacaccagaaacttgtgaagaaaattatggcacatttgtataacttcagtgtcaagaagccagcggtattttgcagataatgcaaggtctgtagatcgaaaattaagttgggtgtcttcctttagtgtacaaacaccttggatgtttgaggaaatccaaagacaaggttctaggcattttatacgtgttaactcatgtattatgttaattctcacaataatcctttggaactagtacgatcaccatccctgccttattgaggaggaaatggggtacagagagcttaagcaacttgccagtgtcatgcagcagggaagcgctggaggcagggctccaacccacgcagccttgctgcatgtttgtggaatgaacacaggactcaggcacacaaccatctggctgaggctccatgagcagccaggagcctggtcccaatgcagtctccttataggcacaaatggggtgccccttgagacaggaataataaaggtggtcacaggagaacggaaaattccaggcaacagtttcacatgactagcaaaggaaaccgttgaaatcgctgcgtaagctaggggcggataagactctgaaaaccagggtgtgggccaagctggctaaagccgactggacccaacatggtgctggattcgacccgtttcacctaggacctctcattatgtgctcattaacatactaagtcacacacccactgtgacagctctggggaacacccgtatttagtataaaaatgtgtggcaccgcagtaccaagaaatgtttacctttttccaagaatcttcatgaatattccaccccttggttaaataaatatttaaaggtagctccaaaccccgctgggcgtgatgctctgtggtatgcctgcacttttctttcttcagtacgtacttattcccgtcgcaatgaatctccacactttgttctgctcatccatgaattccttctcacgacagtgtcaagagcctggacaccagtcagggtcgaggcctcaccagcatcttggggcctcactgggcacagacgcgtgagcgcccggcctgcagacctgactctggcagccgctcaggccctcagagggagagatggaagctggcaggacgcagttgctaccgcgcggacccggcccccgaccagccttggcccctcgcgcgccgggacagggccacaaatgactgcacctgggcttcgctggcccaggcaccacgcgactctaagcgcgcccaaagcgaccctctgcgcaaactacccccggggacgacgtcacccgtgaggtcccgcggcgcctcctcctaaagctcggctgggaaaccgtccgcttccccaagacttgggggcttgtggccgagttgttttagttttcctgtaggattcacgggtggctgaggcaaacacgcttgaaggcctaagacttttaagtctcttccgcaccctctcttctgtctcttccacctggaggatgaccgcttttttgggggttttgttgttgttttgagacggagtctcgctctgtcgcccaggctggattgtagtggcgccatctccgctcactgcaacctccgcctcccgggttcaagcgattctcctgcctcagcctcccgagtagctgggattacaggcgcccaccaccatgcccggctgatttttgtatttttagtagagacggggtttcgccacgttggtcaggctaatatcaaactcctgacctcaggtgatccgccctcctcggcctcccaaagtgctgggatgacaggcgtgagccaccgcgcccggccgggatgactgttattaacaattcccggcgtggtttctagcaccagcccacctaccacaccccacctcgcttgaggctgaatgggtaacaggatgaacccgcccctgggctggttttctctgaaccctaactcctgccgttacgccccaccagctctaggccaggaactctatgtgccccggccacgctagagcccgtacctagacccgtaggtcgggaggcctgcgcccggcactgcgcagacgcagcgtgctgtgcccagaactcttctgttcccaggagaatcaggggagtcggcgccggaaggggcgggtccgagctgagatttccagagccatgggagccggaagtccaaggaactgtacctccatcatgacgactccggttacgtaaaaacattcaaacagaaaatgctggccaggctcatgcctgtaatcccagcactttgggaggccgaggcgggaggatcgcttgtgcccaggagttggagaccagcctgggcaacatagtgagaccctccccccacccatctctacaaaaaattttaaaattagctagctgagatcatgccactgcactccagcctggacaacaaagtgagactatgtctcaaaaaaatttaaaaattacccacgcctgtagtgtcagatagtcaggaggcagaggttggaggatgacttgagccttggggatcgagggtgtagtgaggtatgatcgcaccactgcactccagcctgggcaacagagcaagaccctgtctcaaaaactatataaaagaaaaaagggctgggtcggtggctcacgcctgtcatgccagcactttgggaggccgaggcgggtagatcacctgaggtcaggagtttgagaccagcctgaccaacaaggtgaaaccctgtctctactaaaaatacaaaaattagctggccatgatggtgggtgcctgtaatcccagctactggggaggctgaggcaggagaatcacttgaaccccagaggtggaggttgcagtgagccgagatcacaccactgcactccagcctgggcgacagagcgagagactccgtctcaaaaaaaaaaaaaaaaaaaaaaaaacagaaaaaaggccgggcacggtggctcactcctgtaattccagaactttgggaggccaaggcgggcggatcaggagttcgagactgcctgggcaacatagcgaaaccccgtctctactaaaaatacaaaaaattagccaggcgtggtggcgggctcctgtaatcccagctactcaggaggcttaggcaggagaatcacttgaacccaggaagcagaggctgcagtgagccgagatcacgccattaaactccagcctcggtgacagagtgagactccatccccgctccgctccctcacctcccgccaaaaaaaaaaaagaaaatgcactgcaatagaaaaataaaagtactacactttggtcaaacagggtaactactagaacgtaaaatgatctttttgaaactatccacatttgttacacgtgttgaaaatgtaggatatatatgttatatatatacttatatatgttatatatacttatatatgttatatacttatatatgttatgtacttatatattatatatacttatatatgttatatctacttatgttatatacttatatatgttatatatacttatatatgttatacatacttatatgttatatatacttatgttatatacttatatatgttatatatacttatacatgttatacatacttatatgttatatatacttatatatgttatatatacttatatatgctatatatacttatatatgctatgtatacttatatatgttatatatatacttatatgtatgttatatatacttatatatgttatatatgcttatatgtatgttatatatgcttatatgttatatatacttacatatgttatatatacttacatatgttatatgtacttacatatgttatatatatacatatatgttatatatatataattatatatatataaaacaaaaagcacggttactacaaagaaaacaggtaaacattaagtggagtaaaagtatatcctgttatataagggacttgaacatgtctgggcatggtggctcaagcctgtaatcccagcactttgggaggctgaggcgggtggattactggaggtcaggagttcgagacctgggcaacatagcaagaccttgtctctattaaaaaatagatagatagatagatagatagatacatagaacatcaaaagagggagagagaaagcagacagatgtggcaaaatatacacaattggtaaatttgggtgaagggaatataagttatttctactaatcttgcaattcttatgtatatttgcaatgatttctaaataaaagtttttaattaccaattgaaataaagtaaaataagtcactatctagccttttctagacaaatattttaaactcttacacagagataagttaatcaagaaacgtatttcctggaaaaacccgtgatatgggtggagccacctgggaataaaaggtcggaacatcataatcactgtcagactcaacttccatcattctcctccaggcgctatggagtctaatccaggcactttggaaggctgaggctggaggatcgattgaggccaggagtttgggaccaccctgggcaacatagcaagatctcatttctgaaaaaagaattatcatccactcacccagaacagctctccaaactgtaagtttcattcaaggtttgcttgtttgggtgatgggatgtgtgtgtgtgtgtgtgtgtgtgtgtgtgtgtgtgtgtgtgtatgtgtgtgtgagtgttggaaggagggtctgtctaaacttaatgccctaaagatattgtcagatattgtgatgaggggaatttcatcttctaccctttatgaggttgaattgtaaattcgaaaatcctgattctgggtttttattttgaggggatagttttctgttttctgtggcattggatattggcattttcagaaaagagcatgcatccaaaatgaaaatgatgaagcctacctgtcttttgaactcagctcagggaaaagctgatgatctctaatttttgtgattcctcctttcattaaatttaaggtccagtgagggtgaagtttccctaaagaggcaataatttatcagcagcaacaggatgaaatggaggggcttttcttcacactctatatattatgttaggatctctcaggaaactgaggacacattaattataatcatggaagattttctgcttcccacatggtttgctgggtttggcatagtatagctcatgccctacattgaagaaatgtgggcacccatcaacagcagccatttctgattacacatccctgtttctttagctgagtgactcctaaaagtcccttaatgtattaataatgcatttggacctcagttttcttactatgttaaatgtaataaaattgaatatcatatggtcacttgcagaattaaatggtattaaggcatgtaaatcatatagagtgatgtagtacaacaaacaataaacctgtaataaaagtcactaaactcccttccctcccatgatggagccttaattttctctatatgaggcatccctgtagtttaatatattcttagaattagcaataggaatatgatgtcaacaattaattttgagccattttagcccaatgacttatcctaagaagtcgctattattgttgccatcccgttttcacttatacgaaagtaagactcaggagggttgagtttcagccttagtgttagaaaagcagtaagcggtgaagccgggcttggaatcctggaagttggaatgtacaatgtgtgatctcgatgcatcctctctgtagtgcctctttgtaacaagaaaaaaataaagatacttaaagttctaggtaagcaaagtcagaactagtctttaagttagagacccataaagtataaggtttctcaaacaacaaatgttgttagaaggtcttgttgtggcagagttccaagaaaaccaatgaatgtgaagtcagttgatatattaatctaatctgtgtaattggggaggggcacttttaggaatgcatttagagataatcccattaacacaggaggttttctcccagattaaattaacgtaaacgactttggaggaaggttggttttcccagtttctaagatataatgcaataaattaacatgaaagatggttgggactatgtgcagactttttaaataaacctcagtttcaggactctgacctttttgtttcttcctagtaacagccgtggcagtcagagctctgcctgcagtgtgaccatggacagctctccaaagcttaaacttcagtaaattgactcaagtttcttcggaaagaactgtgagtagcaaagggcaactttttctgttggtttcattgggatttcactgcttttcctgaaattggaatgttggaaggaagtaggcattcctcactgcctggggagaaatgggcaaatgagtaaggggagggagcaaattcagagagatattttttattttttctgaaacctgtttgtgttttgagatgtctttcccttcatgtttttttttttttcactcttcatatttccctttctctgtctctctccccacctcggttttgctaattagctagcacaacaactcgccatcttactccttttccttactccctgttttttgtggggttttttttttggttttcttttttgttttttttttgtttttgtttttgttttttgtttttcagacagagccttgctgtgtctccccagctggagtgcagtggcgagatctctgttcactgcaacctccacctccagggttcaagcgattctcctgcctcagcctccccagtatctggcactataggtgcctgccaccatgcccggctaatttttgtatttttagtagagaccaggtttcaccatgttggccaggctagtctcaaactcctgacctcaggtgatccacctgcctcagcctcccaaagtgctgggattacaggtgtgagccaccgtgcccagacagaacttctttatttttgccttaattttgttatttaaccagtagtcattcaggagcatcatatagagtgatgtagtacaacaaacaataaacctgtaataaaagtcactaaactccctttcctcccatgatggagccttaattttctccatatgaggtagtttaatatattcctaggattagcaataggaatatgatgtcgacaattaattttgagctgttttagcccaatgacttatcctaagaagtcgttattattgttgcagtcccattttcacttatgtgaaagtaagactcaggagggttgagtttcagccttagtgttacaaaagcagtaagtggtgaagccaggctttccatgtagttgtgtggtttttagtgagtttcttaatcctgagttataattggattgcactgtggtctgagagcttgtttgttatgatttccgttcttttgcatttgctgaggagtgttttacttcgaattatgtggtcaattttaaaataagtgctatgtggtgatgataatattgatctatctaatattaacaggggggtgttaaagtctcccactattattgtgtgggagtctaagcctctttgtaggtctctaagaacttgctttatgaatctggatgctcctgtattgggtgcatatatatttaagatagttagctattcttgttgcattgatccctttaccattatgtaatgccctctttgtcttttttgatctttgttggtttaacatctgttttatcagagactaggattgcaacccatccttttttttgctttccatttgcttggcaaatattcctccatccctttattttgagcctatgtatgtctttgcacatgagataggtctcctgaatatagcacatcaatgggtcttgactctttatccaatttgccagtctgtatcttttaattgggggcatttagcccatttacatttaaggttaatgttgttacgtgtgaatttgatcccatcatcatgatgctagctggttattttgcacattagttgatgcagtttcttctgtgtcattggtctttatattttggtgtgtttttgcagtggctggtaccggcttttcctttccatatttagtgcttcctccaggagctcttgtaaggtaggcctggtggtgacaaaatccctcagcatttgcttgtctgtaaaggattgtattttttcttcgcttatgaagcttagtttggctggatatgaaattcagggttgaaaattccttaagaacgttgaatattggcccccactgtcttctggcttgtagggtttctggagcaatccactattaatctgatgggcttccctttgtgggtaacccgacctttctctctggctgcccttaacatttttttcctttgtttcaaccttggagaatctgacgattatgtgtcttggggttgctcttctcgaggaatatctttgtggtattctctgcatttcctgaatttgaatgttggcctgtcgttctaggttggggaagttctcctggataatatcccaaagtgtgttttccaacttgattccattctccccgtcactttcaggtataccaatcaatcgtaggtttggtcttttcacatagtcccatgtttcttggagcctttgttcattccttttcattcttttttctctaatcttgtcttcacgccttatttcagtaagttgatcttcaatctctgatgtcctttattctgcttgattgatttggctattgatacttgtgtatgcttcacgaagttctcatgctgtgtttttcagctccatcaggtcatttatgttcctctctaaactggttattctagttagcaattcctgtagccttttatcaaggttcttagcttccttgcattgggttagaacatgctcctttagctcagaggagtttgttattacccaccttctgaagcctagttctatcaattcatcaatctcattctctgtccagttttgtgtccttgctgaacaggagttgcgatcatttggagaagagacattctgttttttggatttttcagcgttgttgtgctggtttttcctcatctttgtggatttatctacctttgatctttgaggctgttgatctttggatggggttattgtgtgggggtcttttttgttgatgttgatgttgttgctttctgttagtttttcttctagcagtcaggcccctcttctgcaggtctgctgcagtttgctggaggtccactccagacccttttcacctgggtatccccagcggaggctgcagagctgcagaacagcaaagagtgctgcctgttccttcctctggaagatttgtcccagaggggcaccagcctgatgccagccagagctctcctgcatgaggtgtctctcaacccctgttgggagttctttcccagttagaaggcacgggggtcagggacccacttgaggaggcagcctgtcccttagcagagctgttgtgctgtgctgggaaaatccctcttatcaggatcagctgctctcttcagagccagcaggcagaaaagattaaatctgctgaagctgtgtgcccacagccaccccttcccccaggtgctctgtcccagggagatgggaattttatctgtaagcccctgactgggactgttaccctttcttcagagatgccctgaccagtgaggaggaatctagagaagcagtctggccacagctgctttgccatgctgtggtgaactttgcccagtccaaacctcccaccctccttagcactgtccagggaaaactctactaacgcctcattaatcacggatgcgcctcccccaaccaagttccatcattccaggtcaacttcagactgctgcactggcagtgagaatttcaagccagtggttcttagcttgctgggctccatgggagtgggacctgctgagtgagatcacttggccccctggcttcagccccctttccaggggagtgaatggttctgtctcactggggtttcaggcaccactggtgtacaaaaaaaaatcaactcttgcaactagctcggtgtctccccgaacagctggctagttttgtgcttgaaacccagggccctggtggtgtaggcacacaagggaatctcctgatctgcagattgcaaaaactgtgggaaaagcgtagtaaccgggcgagtagcatagttcttcacggcttcccttggctgggggagggaggtccctggctccttgcatttcccaggtgaggcaatgccccaccctgcttctgctcgccctccatgggttgcacccactgcctaactagtcccgatgtgatgaactgggtacctcagttggaaatgcagaaatcgcccaccttctgcattggtctcgctgggagctgcagagcggagctgttcctatttggccatcttggccccgccccttttttaattttaaaaaattttatgtagcgatgaggtctccctattttgccatgctggttttgaactcctgggctcaagtgatccttccacttggcctcccagagtgctaagattacaggcgtgagccaccatgcccaaccaaatttgtattttctcgatgagcagtgatgctgagcacctgttcatatctctgttggccatttgtatattctttctcgcctaacagctcccttgaaaatgcgtgtgcctcagtctatgtcttctggagaactggcacagcttcagaatattagcaccccaaaagagtattttacttagagcataagaagactaaaaataaatcattattatatgtggatgaggtttttcataaaatataactgttaatatattcttggttaaaatgcatgtgtgcttttcttctttaggttacataaagaaaggatgatatctctaaaggtatgtggattcatccaaatttggagccagaagactgggatgactaagctgaaagaagctctcattgaaacagtgcaaagacaaaaggaaattaaactggtggtcactttcaaatctggaaaatttataagaatttttcagctgagcaacaacattagaagtgtggtccttagacattgtaaaaaaagacaaagtcacctgcgtttaactttgaaaaacaacgtgttcttgtttattgacaaattatcctacagagatgctaaacagttgaatatgttcctggacataatccaccaaaacaaatctcagcaacccatgaaatctgatgatgattggagtgtgtttgaaagcaggaatatgctgaaggaaattgacaaaacttcattttacagcatttgtaacaagccaagttatcagaagatgcctttgtttatgtcaaaatcaccaacacatgtgaaaaaggggatattagaaaatcaaggtgggaaggggcaaaacacactatcatctgatgtacagacaaatgaggacattctgaaggaagataaccctgtaccaaacaagaaatataagacagattccttgaaatatatacaaagcaataggaagaacccatcaagtttagaggatttagaaaaagatagagatttgaaactcgggccttcattcaataccaactgtaatggaaatcctaacctagatgagactgttcttgcaacccagactctcaatgccaaaaatggtttgacatctccattggaaccagagcacagccagggtgacccaagatgcaacaaagcccaggtgcctcttgactctcattcacagcaactgcagcaggggttccccaatttgggaaacacctgttacatgaatgcagttttacaatcgctatttgcaattccatcttttgctgatgacttactcactcaaggtgtcccatgggaatatattccctttgaggctcttattatgaccttgacccagctgcttgctttgaaagatttctgtagtacaaagatcaagagagaattacttgggaatgttaaaaaagtcatttcagcagttgcagaaatattttctggcaacatgcagaatgatgctcatgagtttttaggtcagtgtttagaccagctgaaagaagacatggaaaaattaaatgccactttgaatactgggaaagaatgtggggatgaaaattcatctccacaaatgcatgttggtagtgctgccaccaaagtgtttgtttgccctgttgttgctaattttgagtttgaattgcagctctcccttatttgtaaagcttgtggtcatgctgttctcaaggtagaacctaataattatctctccatcaacctgcaccaagaaacaaaaccacttcctttgtccattcagaattctttagatcttttctttaaagaagaagagcttgaatataactgtcagatgtgtaagcagaagagttgtgttgcaaggcatacatttagtaggctctccagggtccttatcattcatctgaaacgctatagcttcaacaatgcttggttgctggtgaagaataacgagcaagtttatattcccaaatctttaagtttatcttcttattgcaatgaaagcaccaaaccacctcttcccttgagcagtagtgcacctgttgggaaatgtgaagtcctggaagtctctcaggagatgatttctgagatcaacagcccattgacaccatcaatgaagctgacctcagaatccagtgattccctggttctacccgttgaaccagacaagaatgccgacctacaaagattccagagagactgtggagatgcaagccaagagcagcatcagagagacctggaaaatggctctgcactagagtcagaattggtccactttagagatagggcaatcggtgaaaaggagcttccagtggctgactcactgatggaccagggagacatttctcttcctgtgatgtatgaagatggagggaagctgatcagcagcccagacacaaggcttgtcgaggttcatcttcaagaggtgcctcaacatccagaacttcagaagtatgagaaaaccaatacattcgtagagttcaattttgacagtgtcactgagtccaccaatggcttttatgactgtaaagaaaacaggattccagaaggatctcaaggaatggctgaacagctccagcagtgtattgaggagagcatcatagatgaatttcttcagcaggcaccacctccaggtgttaggaagctggatgcccaggaacatacagaagagaccctcaatcagtctacagaattaagacttcaaaaggctgacctgaatcaccttggggcactgggttctgacaacccaggaaacaaaaacattttagatgcagagaacacaagaggtgaagccaaggaactaacaagaaacgtgaagatgggggatcctctccaggcctacagactcatcagtgttgtcagccatatcgggagctccccaaattcaggccattacatcagcgatgtgtatgactttcagaagcaggcctggttcacatacaacgatctatgtgtatcagaaatctcagagaccaaaatgcaggaggcgaggcttcactctgggtatatcttcttttacatgcacaatgggatttttgaggagctgttaagaaaagcagagaactctcggctacctagcacacaggcaggggtgatccctcagggggaatacgaaggtgactctttgtacagacctgcttgacagactcactcggcctcacttcatccttgcaaagagaatcctgtacttcatccttgcaaagagaatcctgtacttcactcagaatgaaggaacaagtatctcaggatgaaatctcaatgaaaaacacttattttgggggaatatctattttaactgcttcagacacctagatcccagaactcaggcgcatatgcatattttccctgcaagattagaatggtgctcttcacgttttgacggtggttttcaaaatgttgttcttcaaccagcaacagcaacagctagggactgattagaaatgcaaattcttgggtcactctctagaccaactgatgcagaaacaggaggtgtgagccagcaatcagatggagattctagtgctcatgaaagtttgaagaacactggtaatgtgtggagtatcttggtgtattttgctactgttgatatggattgcttatgttatataaacgattttcattaaattttttgcactcttttattttgtcccactgaacctaagactagatagagtcaccccaaaagtggcagcagggaaattccaacaagagagtgcccaaaaccattctgagatcgggccggttgggattccaaagaaagaagcaccaaacaccagagggatctttccggagcatttattagggggaacttagagagttctgcagcataccctcaggcggacagtgagagaaaaaagcatggtcaaccagctgggcaccgtggctcatgcctgtcatcccagcactttgggaggccaaggtgggaggactgcttgagcagaccagttcaaaaccagcctgggaaatatagcaagaccctgtctctacaaaaaataattcagcagccaggcacggtggctcacatctgtaatcccagcacttgggaggccaaggcgggcggatcacctgaggtcgggagtttgagaccagcctgaacaacatggtgaaactccgtctctactaaaaatagaaaattagctgggtgtggtggcaggcacctgcagtcccagctactcaggaggctgaggcaggagaatcacttgaacccagcagatggaggttgcagtgagccgagatcgcaccactgcactccagcctgggcaacaagagcaaaactccatttctaaataaataaataactttgccaggcatgtctcagctgctcaggaagccgatgtgggaggatcacttgagtctgggagttcaaggctgcagtgagctatgatcacactactgcactccagcctgggtgaaagaccctgtctcaaaaaaaaaaaaaaaaaaaaggcgggaggggggatggtctaccttggtgtgtctgctgcagtgagagggtcagggtatggggttatataagtttataaggaatttggtcaagggtggggactagtttcttttagtgttttgggcaacaacctaaacctaaatacctctatcagtgcctgggaatgtttcaggctctactttggattcaagccttctgggaaaagcctgcagcttggctggtcagagtggtcaaagcagtccatgattttcagtcacgacacagaaagaaagcagggggtgagtacttttcctttgtaaagttattaaaataataacccaacccatacatataccattggctagcttccacatgtgtttatgactggtgactagtaaaatttgctatgcagcaatcaactgttatttaccattttccaggaatttcagggcataacattagggttatatgcaaaatgcagtatactaaatatccgtgtgattttgtgaattcaaaagcactgcaagatgttgctcatgttattaatatgaataagacgataaacccatcctcataaatgtacaacatttcctggtggccaagccttaaacagcttataatgtacccagtatcagtgggtgatgtgttagactgtgaattcagcaaggagtaaagaacgatttttttaaatggccatgtgagtagacaaatggaaattgagaggattttttgggtaaaaagagataagagcctggtattatataaggaatggggcaaaattaggcagagtaggtgtgggaaagaagagaagagcaaccagaaacatacgtacgaggtttttaaaaatacattatttttagcatttaagaggaaaagaaggaaagtactatgaaaaaagaaatgtaggccggtcacagcggctcacgcctgtaatcccagcactttaggaggccaaggcaggcggatcacaaggtcaggaaatcgagaacatcttggccaacatggtgaaaccccgtctctactaaaaatacaaaaatgagccaggcgtggtggtgcatgcctgtcgtcctagctactactttggaggctgaggcaggagaatcacctgaaccagggaggcggagattgcagtgagctgagatcacaccaccgtactccagcctgggtgacaagagtaaaactctgtctccaaaaaaagaaaaagaaaagaaagaaacgaggctgagtgccatggctcatgcctgtaatcaaagcactttgggagcctgaggtggaaggattgcctgagcccaagagtttgaggctgcagtgagctatgactacaccactgccctccagcctgggcaacaggtgacaccctatctcaaaaggaaaaacaaaaaaggcaaatggcaattgcagtgaagaaatgccaagataccttcatgctcaggagagaaagctgtacttcctggatgtggtttccagtcccctacacctctagagaaacctctccactcatgaattatagaaatcatccctaaaagtataaagtgctgtcttatttgtttattttattttatcttatttttgagatgaaattttgctcttgttgcccaggcaggagtgcaatggtgcaatattggctcactgcaacctctacctcccaggttcaagcaattctcctgcctcagcctcccgggtagctgggattacaggtgcccacaactatgcctggctaatttttgtatttttggtagagacagggtttcaccatgttggtcatgctggtctcgaactcctgacctcaggtgatgcgcccacctcagcctcccaaagtactgggattacaggcatttgagccaccacgcctggccaaaagtatagtcttttaaacgtttttaaagatatggataccactggtcattattcactggaataaaactccatcagggttttagcacatttggtttattgctacatcttcagtgtttaagagttcctggtacacaaaaggcatctaataaatatttatacttaataaacatttgctgagtgagtatgccgaatgggttttcaaaggatactgtgataataagtcctcgctaccttcaaaaatagcctccaaattagaggccatttcaacatggaattctggggtgacaattccaggcaaccatatcttcccatgtttttttaagtgcatggggctcctatctggagtgaattcttttctggtgcctaacaaggtatgacctgtcagcgaaggctttaccgcattcagaacatccataaggtttttgtccagtatgggtttttttatgcaaactaaggtttaatttccggatgaaggtttttccacattcactacatctataggtcctctctccgctatgagttttctgatggctatgaaggtttgacttctgaaagaaggcttttccacatctgttacattcatagggcttttccccagtatggatttttttatgttgaatgaggtttttcttctggataaaggtatttccacatagatcacactcataagctctcttcccagtgtgaattttctcatgatcgatgacattggatttctgggaaaaggccttctcacatatgctacatttatagggtttctctcccgtgtgtattctctggtgtttcacaagatctgacttgtaaatgaaagcctttccacagtccgtacattgaaagggtttttgtccagtgtgaacttttttatgttgaatgagggttgagttctgcctgaaggatttctcacattcattacactgataggatttcttggcattatgaattttctcatgattaatgcaggatgatttccaggaaaaggcttttccacatgtcttacactgatagggtttctctttagtatgcattttctgatgttgaaagagatttgacttctgcttgtaggcatttccacagttctcacatttatagggcctttcctctgcgtgagttttctgatgtttatcaagcttccacttctccccgaatgctcttccacagctatgacattcaaagggtttttgacaggcatgcctcctcaggtgactttgaaggcgtgactttgaactgaataactttctacaggcattacatttcagttgttgtcctacaaatttggatggattattgccaactaattttctgtatccattatcatcgtgagaattattttgtacatagtgttgcaaggaagatacatcatctatgcccagtggaagtattttcttagatccgtcacattctacacctttctgcgtagtcagcgtttccttattgattgatgggacttctcttgcgagactctctttcacatcctttggcttccaaatctgccctccaatgtccccatttttttctaaaatggaatacaaaaaaatgtcctgtgtaaaacgttccactcacatgcttgaaataaaatgccataaacaatctattgtggtgattattctggcttcaaacctaatgtctacgagaaaccaaagttaatataagctctgttagagttctatgtgagctaatgttacatgaagctatcacatatctgtctgtaaaggactgagcaacgtagacctagtgcacagggagcaggtgagagcctagggataccagggagagggagattaagaaagagagtttgccaggccaggcacaggggctcacacctgtaatcctagcactttgggaggctgaggcgggtggattgcctgaggtcgggggttcaagaccagcctgaccaacatggcgaaaccctgtctctactaaaaatacaaaaaattcgccgggcatggtggcaagtgcctgtaatcccagctactcgggaggctgaggcaggagaatcgttcgaactcgggaggcggaggttgcagtgagcccagatcgcgccactgcactccagcctgggcgacagagactccgtttccagaaaaaaaaaaaaaagaaaaaaaaaagagtttgcctgcaaaggaaaacccagataagaatgtaaagaaatttctgagtggagaaaaatacctggagatttcttccagcactcccaggaagtcacagctggctgccaaacgacttcctcatttagaaaagctgaattggcttccatgcaccattgacccacagtgctctcctggtcacctacctgcacggccacttcccagcacttcctcttcctccaaccatggctcctttccttgttccaacctcaagatcacatcgggtttggtggtttccccttgtcctgtgatggaagataccgcaaggcttggtgtttgtggatgtgtgagttgtttgtgcaagtgtatgagtgtatataagcgcttgcgtatgcttgtgtgaatatttgtgtgtgagtgtgagcatttatatgtcagtgtgtgggtatgtgccattggttggggggagttgtgtggatggatggtttgagggaatgcacctgagcagtcgaactaaacaaagaatgctttttctgggctgggtgtggcggctcatgcctgtaatcccagcactttgggaggccgagataggagaattgctagagcacaggaatttgagaccaacatgttacatgtaacatgaagatagcaagacccagtctctacaaaaccaaagccacgtgtggtggtgcacgtctgtggtcccagctattcaggaggctgaggtgggaggatggcttgagcccaggtcaatgttgcagtgacgccaggcgtggtggttcatgcctgtaataccagaactttgggaggctgaggcgggccggttatctgaggtcaggagttcaagactagcctcaccaacatggagaaaccccatctgtgcaaaaaatacaaaaattagccaggcatggtggtgcacgtctgtaatcccagctactcgggaggctaaggcaggaaaatcactggaacctgggaggcggaggttgcagtgagccgagatcacaccactgcactccagcctgggtgacagagcgagactgtctccaaaaaaaaaaaatactacagtgagctatgattgcaccactgcactccagcctcggtgacacagccagaccctgttaggagaaaggagataaagaaagagagaggaatggagagagggagggagggagaaaggaaggaaggaaggaaggaaggaaggaaagaaggaaggaaggaaggaaagaaggaaggaaagaaggaaggaaggaaggaaagaaggaaggaaggaaggaaggaaggaaagaaggaaggaaggaaggaaagaaggaaggaaagaaggaaggaaggaaggaaagaaggaaggaaggaaggaaagaaggaaggaaagaaggaaggaaggaaggaaagaaggaaggaaggaaggaaggaaagaagggaggtaggaagggaggaagggaaggaggcagggagggagggagggagggagggagggaaggaagggaaagaaagaaatgctttttcttcttggaggataaagcttttccaaaaatcaagaccaggagtagggtgaagggcagggcacccagcccacaaaacttacagaggccctcactcattctcccggcacttgccgaccctgagaatgggggctccttcaatacagcacttggtacacttcacttgcctcaccctagtcccggctctacaaaaacatatgcgaagtgaggagcacctctgtgccaaccctatttggccagccatggggtgtctgtgtgtttcacgccttaggttttgagtccccctgcccgggaagccgtccttacccacagagacaaggttgctgtaattctccagcatcacatccctgtacaagtttctctgttcgggattcagccgctgccactccccctgggtgaagttcacagtgacatcctcgaaggtcactcttccctgtaacaacagattcccgatcagtataaaaatgccattgaatcctgcggctgaggatacagaaacttgtttctgctgaaccaagctttaatcatgtccataattcactctactctggatgaaaataaattgtgcccagaggatcttgccaatgagccataaaccttagacctactcatgacactgccatctttctccaccctctagtcccaccaattttacttcctgaatctcaaacccagccattagtttccatcttctccaccattcataaatccaccttgtcatcttttacttagagtaaggcagaggccgagtatggtggctcacacctatcatcccaacattttgggaggccgaggcaggaggattgcttgaggccaggagtttgaggctagctggggaacatagcaaaacccctatctcaaagaacattttattattttggccgggcacggtggctcacacctgtaatccctgcactttgggaggccgaggcgggtggatcacctgaggtcaggagttcgagaccagtctggccaacatgaagaaaccccatctctactaaaaatacaaaaaattagccaggcatggtggcaggcgcctgtaatcccagctactcaggaggctgaggcaggagaatcacttgaacccaggaggtggaggctgcagtgagccaagattgcgccactgcactccagccagggcaacaagagcaaaactctgtctcaagaaaaaaaagaaaaagaaaaagaaaagaaaagaaaatgttattatattttttttctattttccatttttctttaagacatcctgcctctattagaaattcttttttaaatagaggcctggcatggtggctcacacctataatcccagcacttcaggaggctgagacaggtggatcacccggggtcaggagttcgagaccagcctcgtcaacatggtgaaaccccatctctactaaaaatacaaaaattagccaggtgtcgtggtgcgcgcctgtaatcccagctactcaggaggctgaggcaggagaatcgcttgaaccctgggaggtggaggttgcagtgagctgagatcacaccactgcactccagcctgggtgacagtgagactccatctcaaataaataaatacataaataagtagaataagccaatagccccctaattcttccagctacatctaaactgactgtaatctattttccacagtcgacattcagactggatggtgcgctcccctaatttatcagctttccttgcatttgggagaaacaggtgacacctgttacaggggccagcgtctggcatgtctaccacactcccactcacacagggtcacacagcactcccctgggtctctcctgcagccatactggacttacggcagcattttgcccctgccactcaacactcacagtgttggaagtcacacttgtaaagcgaattcctttgtcagaaactgaaaatctcacctctaagagccagcacctagtgtcctcttggacagataaattttttagttgtgtttgtgctctagctcgcttttttaaaattttgtttatttattaattttttttggcggggaaggggacagaggctcactctggtagcccaggctggagtgcagtggcacaatctcggctcactgcaacctccacctcctgggttcaagcgattctcctgcctcagcctcctgagcagctgggattacaggcgcgcaccacgacacctggctaatttttgtacttttagtagagacgggtttcaccatgttggccaggttggtctcaaactcctgacctcaagtgatctgcccgcatcggcctcccgaagagctgggattaaagggatgagccaccgcacccggcctttttttttaaatttttgacacaggttcttgctctgccacccaggctggagtacagtggcatgatcatggctcactgcagcctcaacctcccaggatcaagcaatcctcctacctcagcctccagaatagctgggactacaggcatgcaccaccatgctaagctcattttttattatttgtagacagggtctcactatattgtccaggctggtcttgaactcctggcctcaagtggtcttcctgccttcgcctcccaaagtgctgggattacaggtgtgagccaccacacccagccttagtatgcctttcctgtcaacaggaaattggtcaacaggcttaattttaacaattgcaaagaaactactatctgcctaactgcatacaacttatccttggtctttcagctatccataatttactttgattccgactggtactagttaatgatttttcagtttattgtgtggatttacagaatttgtttcaaatacacaccgaacaaagttgggagaggacacacattcaagacaccaatcatttaaaaaataggttggggtgaaacacacatgacactgttacatctcagggcttagcagtggaccaggtttgtaagagcaatggtcaaaagatgcttgaggctgggcgtggtggctcacccttgtaatcccagaactttgggaggctgaggcgggtggatcacctgaggtcaggagttcgagaccagcccgaccaatatggtaaaaccccatctctactaaaaatacaaaaattagccgggcgtgggcgtggtggcgtgcgcctgtaatcccagctgctcaggaggttgaggcaggagaatcgcttgaacctgggaggtggaggttgcagtgagccaagatcaagccattgcactccagcctgggtggcagagggagactgtctcaaaaaaaaaaaaaaaaaaaaaaacaacaaaacaaagatgcttgagctgaaaccagcccagtaatcccatagacagttgtgggttttttgttttttgtttttgtttttgtttttgttttttggataaacatagaaattgacccttccgctgttaaagcttgaaacctgtatttgttttgtctgagttccttcctcaggaaaagaccttcagatctctcaaaggcaggcagatcacctgaggtcaagatttcgaggccagcctggccaacatggtgaagccccgtctctaccaaaaaatacaaaaattagccaggagtggtggtgcgcacacctgtaatcccagcaactcaggaggctgaggaaggagaatcgcttgaacctgggaggcagaggttgcagtgagctgagattgcaccactatactccagcctgggtgacacagcgagactccctcaaaaaaaaaaaatcaactgaaactcaccacaactgaaactcaccacaacagatgtctccttgccccctccctagtcttgctttcttacacattgttatatttcttccatgctgtataaacccctagttttagtgagttagggagatggatttgaggctgagctcccatttcttcacctacggcagctgattaaagcttcttccttggcaatacccattgtctcagtcattggctttctgtgcagccagtagcaggacctagaccaaactcctggtgtttccgtaaccaagctttttttttttttttttttgagacagggtcatgctctgtcacccaggctggagtgcagtggcacaatcatggctcactgcagcctcaacctcccaggttcaagcgattctcccacctccgcctccagagtagctgagactacaggtgtacgccaccaccaccacacccagctaattttttgtagagacgggatctcgccatgttgcccaggctggtttcaaactcctgaactcaagcgatccgcctgccttggcctcctagattgctgaattacaggtgtgagccaccatgcccagccttgagctttacttgaaatgtttcagctttaataggaaagcagaaagtagagtgtgtgttaccttttaatagaagtatggaaggaaggaggaaaatatgccaaaaggttagcacagttaattctgagcaagaggaacgtgggtcatacgtttattcattatgagatttagatttttttgaaaagctcacctgggaattgttcatttcctgttcttcaccagtcagtaaagtcttgggaaggcagatctgagggaaaatggaaaagaaccatgaaatagcagaattcgctttggaagttggggatcatccagcatagaatgctccacaccctggataaaagctctccctaacccactcagaaaagccctgacttgtacctcagtgatccccttctgaaggtcttttttttttttgttttggtttttttgtgtttgtttatttattgagactgggtctcaaagaagaaagtgcaagccaggcacggtggctcacgcctgtaatcccagcactttgggaggctgaagcaggcagatcaccagaggtcaggagttcgagaccagcctgtccaacatggtgaaaccccgtctctactaaaaatacaaaattggctgggcgcggtgactcatgcctgtaatgccagcactttgggaggccgaggcaggcggatcacgaggtcaggagatcaagaccatcctggccaacacggtgaaaccctgtctctactaaaaatacaaaaacaaaattagccaggcgtggtggcgggcgcctgtagtcccagctactcgggaggctgaggcaggagaatggcgggaacccgggaggcggagcttgcagtgagccgagatcgcgccaccgcactccagcctgggcgacagagcgagactccgtcccaaaaaaaaaaaaaaagagagagagagaaagctaaacagcagttcaacagcacctttaaaacaagcctgtgcaaagacaatgaggcaagcatcagatcagctagagcacagtaaggaaggccgagagcagaaaccatgaatcctgaagcagctgtggtcgtgacgaataacgccgcagtgaacatgggatgcagatagcccttcagctttgccataagcgggacagctggatcattggtaattctttgccaaaagcgtagattttggccacgcgtggcagctcacacctataatcccagcactttggaaagccaaggtgggaggatcagttgagcccaggagttacttttttttttttttttttaagaccaagtcttgctctgtcgcccaggctggagtgcagtggcacagtctcggctcactgcaacctctgcctcccgggttcaagggattcccctgcctcagcctcccgtgtagctgggattacaggcatgcaccaccatgcccagctaatttttgcatttttagtagagacaaggttttaccatgttgttcaggctggtctcgagctgctgatctcaagtgatccgccggcctcagcctcccaaagtgctgggattataggcgtgaaccaccacatccagccaagcccaggagtttgagaccagcctgtgcaacatagtgaaacctctgtctcaatgtttaagtaataaagtttttattttttattttattttattgaggcagggtctcattctgtcacccaggctggagtgcagtgatgtgatcccggctcacagcagtttaaaaatccctggctcaagcaatcctcctaccttggcctcctgaatagttaagactatgggtgcatgctaccacatcagctaactttttattttttgtaaagaagggatcttgctatgtcacctaaactggtctcaaactcctaggctcaagcaatcctcctccctcagcctccccaaatcctgggattacatgcatgagccaccacaccagccaggaataaagttttaaataagtaaatatgtttttaaaaagaataaacttgccgggcacaactttaatgtttattaaagtttgaggagtccaattctagcacaaaaaatatatataattttaaaaaacagtaaattgtaaatgctttcaccacaaaaatagattaattagcttgatttaatcatccccccaatgtaaacatgtatcaaaacatcacattgtaccccataaataaacacaattattatttgtcaataaaaagtttttagaagtagctgtgggccagcagtaatgctaaggactggagggccacgaaaataattttgagtgtcctgggagcatcacttttcaatatgacaactaaaaaaaaaatctaaactaccaatgtaaaatatttagcttattccagcaaataggagaggtagaaaaatgaaactaagtaaaaatgcaaaacaaacaaacaaacaaaacccagacatttggttttcagggagaaaaaaaaatcagcttacctccagtggaatctggcataaattagcaagttgattgatttctgatgcctgtggtcttttcttctgaaagggactgaaaatgaaaaggcgtgtatactgaaaagctacactaatgactaaaacttaatcggccctctacccgctgtattccgcatcataatccagtcaagaaacaacccaaaacactcacttcctatcaaaagccccacctgatcctatcaggccacatcaaaatttcaattcccaattctttcctcgacttctccaaaactgaatgaactctcataaaaattgtgattgtgaaagcttaattttcaaatctgcccaatcagtttccaatggaattttttttaagttcatgcaagtaaaaattttttaccttaactttgaaatagaaagcatggaaaacattatccaaatgtcagaggatgaaaataaattaaaacaacaaaaattggctgggcacggtggctcatgcctgtaatcccagcactttgggaggacaggagttcaagaccagcctggccaacatggggaaaccccgtctctactaaaaatacaaaaattagctggtcatggtggcacgtgcctgtaatcccagctacttgggaggctgaggcaggagaatcgcttgaacccgggagacggaggcttcagtgagccaagatcgtgccactgcactccagcctgggcaatgagcgagactccatctcacgtctcaaaaaaaaaaaaagaaaggaaaagaaaaaagaaatagggccagcggaggtggaacaatgccttaaagtgctctccgcccgacagaaagaattcaggctccaacctccaactggcaaaatctcttcagctgtactaatactctcaaaatgagatcaacatgccaatccatccccaccctagtctgggtgttgaatttaaacacaggctacatgcccttgcctgcagacatggagaccttccaaaattgagcgtccaactgaattccaagagattaaaccagacttcatgggacaggatgcaccagactagacctcctcccaggagaagaggtatccaaagatcgtattagcaaatgacccttggcggtgtgcggtggctcaagcctgtaatcccaacactttgggagactgaggcagacagatcacctgaggtcaggagttcaagaccagcctggtcaacatggtgaaatcctgtctctactaaaaatacaaaaattagctgggcatggtggtacacacctgtagtcccagctactcagctactcaagaggctgaggcagaattgcttgaacccaaaacacagaggttgctgtgagctgagatcatgccactgcactccagcctgggcgacagagggagactccatctcaaaaaaaaaaaaaagaaaaaaaaagcaaaatgacccagccagcctgaatcccagccgccgtgtcggactactatagtcccagatacttggaaggctgaggtgggaggatcaattgagcccaagaggtcaaggctgcagtgagcaaggatcttgccactgcattccagcctgagagacagagcaagcctgcaggtgaacggaaaggggtggagtgattttatatatatatatatatatatatgtatatatatatatatatatatatattttttttttttttttgtctgagccgctgtgcctggccttttttatttttttttagagacaggctggtctcaaactcctggccccaagtgatcctcccatcccagcctcccaaagtactggtattacagatgtgagccactgcagttggctcaacagcagattttcaatgtagatgaaaaagccatctattggaaggagattccatctaggatttttatagctagagagaagtcaatgcctggcctcaaaacttccaaggacaggatgattctcttacatgaaactaatgcagctggtgactgaatttaatctaatgctcacttaccatttaaaaaattttaaagcctctaagaattatgctggccaaatgcggtggctcatgcctctaatcccagcaatttgggaagccaaggcgggcagatcacttgaggtcaggagttccaagccagcctggccaacatggtgaaaccccatctctactaaaaatacaaaaaaattagccaggcatggtggcccgtgcctgtagtcccagatactcaggaggctgaggcaagacaatcacttgaacctcggaggcggaggctgcagtgagccgagatcacaccactgcactccagcctgggtgacagagtgagactgtgtctcaaaaaacaaacaaagaaaagaattatgttaaatctactctatctgtgctctataaatgaaacaacaaagcctgggtgatagcacatttgtctacagtatggttttgattattttaagcccactgttgagaactatttctcagacaaaaagaaaaagattcccttcaaagcattactgctcttcagatcccaggtgttaagccagtaaacacaataaataaataaataaataagtaaataaataaataactgctcatcaaacctaaacacaaaaatagaaaaataataaaaaagcaaaagaccacacaaaaacaaaatatcactgctcattgaaaatgtatcgggtcactcaagagctgatggatgaatcttaatttcagttgaagaaaaaaactctgatggagatgtacaaggagatgaatgttgtttgcatgcctgctaacacaacatccattctgcagaccgtgggtcaagaagtaattttgactttcaagtcgtgttatctaagaaacacatttcataaagccatttctcccatagatagtgaatcctctgatggatcggggcaaagtccattgaaaacctccatgaaacagttcatcattctaaatgccattaagaacatttgtgattcatggaaagaggtcaaaatatcagcatgaacaggatttggaagaagtggattccaaccctcatggatgactttgaggggttcaaaaattcagtggagaccaggcacatgacttatgcctataatcacagcattttaggacctaaagtgggacgatcacttgaggccaggagtttgagaccagcctggcaacatagcgagactcccatctttatttttaaaatatatattaataattcaatggaagtagtgactgcagatgtagcagaaatagcaagacaactagaattggaagtggagcctgaagatgtgactgaatttttgcaacctgctggtaaaacttgaacagatgaaatttttttttaattaaaaaaatgttttaaatgaaagaccctttgagaagtgtctgttcatgtccttcacccactttttgatggggttgtttgtttttttcttgtaaatttgtttgagttcattgtagattctggatattagccctttgtcagatgagtaggttgcgaaaattttctcccattttgtaggttgcctgttcactctgatggtagtttcttttgctgtgcagaagctctttagtttaattagatcccatttgtcaattttgtcttttgttgccattgcttttggtgttttggacatgaagtccttgcccatgcctatgtcctgaatggtaatgcctaggttttcttctagggtttttatggttttaggtctaacgtttaaatctttaatccatcttgaattgatttttgtataaggtgtaaggaagggatccagtttcagctttctacatatggctagccagttttcccagcaccatttattaaatagggaatcctttccccattgcttgtttttctcaggtttatcaaagaccagatagttgtagatatgcggcgttatttctgagggctctgttctgttccattgagaagacatttatgcagccaaaaaacacatgaaaaaatgctcatcatcactggccatcagagaaatgcaaatcaaaaccacaatgagataccatctcacaccagttagaatggcaatcattaaaaagtcaggaaacaacaggtgctggagaggatgtggagaaataggaacacttttacactgttggtgggactgtaaactagttcaaccattgtggaagtcagtgtggcgattcctcagagatctagaactagaaataccatttgacccagccatcccattagtgggtatatacccaaatgactataaatcatgctgctataaagacacatgcacacatatgtttattgcggcattattcacaatagcaaagacttggaaccaactcaaacgtccaacaatgatagactggattaagaaaatgtggcacatatacaccatggagtactgtgcagccataaaaaatgatgagttcgtgtcctttgtagggacatggatgaaattggaaatcatcattctcagtaaactatcgcaagaacaaaaaaccaaacaccgcatattctcactcataggtgggaattgaacaatgagatcacatggacacaggaaggggaatatcacactctggggactgtggtggggtggggggaggggggagggatagcattgggagatatacctaatgctagatgacgagttagtgggtgcagcacaccagcatggcacatgtatacatatgtaactaacctgcacaatgtgcacatgtaccctaaaacttaaagtataataaaaaaaaaatagaaaaaaaagaaaaaataataaaattacaattcatgtttccataaaaaaaagaaagacctcatgaagcgggcagatcacgaggtcaggagatcaagaccatcctggctaacacggggaaaccccgtctctactaaaaatataaaaaattggccgggcatggtggtgggcgcctgtagtcccagctattagggaggctgaggcaggggaatggcgtgaacccaggagacggagcttgcagtgagcagagatcacgccactgcactccagcttgggcgacagtgctagactccgtctcaaaaaaaaaaaacttgacctgatgaggaattgcttcttatggataagcaaataaattgtttttttgtttgtttgtttgttttttgagactgagttttgctcttgttgcccaggctggagtgcaatggcgcgatctcagcttaccacaacctctgcctcccaggttcaagcaattctcctgcctcagcctcccaagtagctgggattacaggcatgcaccaccacgcccggctaatttttttttgtatttttagtagagatggggtttctccaggttgaggctggtctcgaactcctgacctcaggtgatccgcccacctcggcctcccaaagtgctgggattacaggcgtgagccaccgtgcccagccttaaagtgtttttttaaaggtactcaaatatgtcaattttattgtttctctatgtgcacatttatttgctactgaaaattgcaaaagcagtacatcatggcttcttattgcaatgcatcctcccacctcagcttcccaagtagctgggaccacaggcatgtgccacttcacctggcaaatttttttgaaaaatttttttgtagagatggagtctcgccatgttgcccaggctggtcttgaactcttagcctcaagcaatactcctgccacagcctcccaaaacgctgggattacatgcaatagccaccatgcctggcctacttcaagttcaaaaatttaaaccaaccttcatcccagtgtcttcacaaatgctcagcaaagaaaattcctaagacaattcagggacctctcataaccttactgagagacgttaataaagaaccttagtaacttgactctcaactctactaccaacccttcccctctagcagaagtttcaccccaacaacaggatagaagagaaacaatcttccaggacatcagagatggcttgccttacaggaggaaattagtaagaacattgctctctgtggggaaagaaaggatggtaaaaatcgagatacctattaatagattttctcagcttgaaagagaactgacactaggcttaagggagcgcagaatgaatcaagaagtgaaccattcaaatgtggctgcagtttttgtgtgtatcacagatgggatccttctgagaatgctagaaaagggaattatgacacagagcctattcagccataaacattatttttgtactttttctttcttgctggtaattttttcctattcttttgagatggagtctcactctgttgcccaggctggagtgcagcggcatgatcttggctcactgtagcttccggctcctgggttcaggcagttctgcctcagcctcccaagtacctgggattagaggcgcccaccactacgcccagctaatttttatattttgagtagagatgtggtttcaccatattggccaagctggtcttgaactcctgacttccagtgatccacccgcctcggcctcccaaagtgccgggattacaggtgtgagccaccacgcccagccttcttgctggtaattttttatatagtgggttaagaaagctactctatgctaggatagactatcgcaatatttttgatatctttttctgtgatatctttttctcatacattttccttcctacaatgacactggtaacttataaggaatctgtgtagtttgaatgtatttgaataatttcaatataccttagtgctactctttgatttaatccctaaagcaccaataggtcctaaatattctcatgtgttttagaagcctgaagtcagtgagaaaaacccacagagagcaatgtttttactaatttcctcctgtaagtctagccacctctgatgtcctggaagattgtttcttttctatcctgttgctcgggtgaaccttctgctagaggggaagggttggtagtggagttgagagtcaagttactaaggttctttagtaacatctcacagtagagggtatgagaggcccctgaattgtcttaggaattttcttcagtgagcatttgcgaagactcggatgaaggttaggttaaacttttgtcatgggtccattggcaggctagtcacaagtgcctcctggatctttgggtcctggcggaaaacgatgccagactctcaaattgccacaaggtagcctggaaagaacgccacagtccagaaggagcctcgaaagtggtttcatgaggtggaatttactcctggtgaagatgctgtgaacgctgtttaaactacaacagaggatttacaatattgacgcacgtagttaagaaagcagtggcagggtttgagaggattggctccaattttgaaagaagttctattatgggtaaaatgctatcaaacaacatctcatgttccagagaaatctttcgtggaaggaagcgtcagttaatgtggtaaatttcattgttgttttaacaaattgttacaaccacttcaatatttagcaaccaccacccttatcagccagcagccaatgacattgaggcaagactcctcaccagcaaaaaagattacgactccctgaaggctaagatcattattagtatttttagcaataaagtatttttatataatttctttttaaaaaataatggagcttcaaataagggcatcaggtattttttcttttaatagatggggttttgccatgttgtccaggctgagctcaagcaatccacctgcctcggcctcccaaagtgctgggattacaggcgtgagtcaccccacccagccagcatcaagtgttttaaaattaaagtatgtgccttgtttcctagacataacaccattttacactttattagactacagtgtagtgtagtgtaaatgtaacttttttttttgagagggagtctcgctcggccacccaggctggagtgcagtggcgcgatcttggctcactgcaagctccgcctcccaggttcacgccattctcctgcctcagcctcccgagtagctgggactacaggcacctgctaccatgcccggctaattttttgtaatttttttttttagtagagacggggtttctccacgttagccaggatggtctcgatctcctgacctcgcgatctgcccgcctccgcctcccaaagtgctggtattacaggcatgagccaccgcgcccggccataacttctttttttaaatagagacaggatctccctatattgcccaggttgacctcacaactcctggtctcaagtgatcctcccccttccatgtcctaaagtactgggattataggcatgagccaccacacccagccaatgtaactttatattcacaaggaaacaaaaccatttttgtgactcactttatagcaatatttgctttattgtggtgggctgcaacccaatccacaatatctttgaggtatggctgtactttctaagtgtttcctgagtcagcctactttttctccattttttggtcattattctatccggttttttttttgttttgttttgttgttgtttggaaacaagaacttgctgtgtcgcccaggctggagtgcagtagcacgatcatagctcactgcagcctcaccatccctgtgttcaaaccattctcctgcctcaggctcctaagttgctgagactacagatgcacactaccacacctggctcatttttaaaaaattgtttgtagagatggggtctcatcatgttgcccaggttgatctggaactcctggcctcaagcaatccttccgcctcagccttctgagtagccctgatcaatccattgttgaagaatacatggatgttactttgcagtctgtcatcctgaatttgtgttcacttgacattgcctaattattagtttcagcttacccactttttgtcactaacacgcagaagagactgtggccttcttactgtatcatatcaggaagcatctcacattggtttgtgccattactggtgcagtgactttcagccacttggttaaggtggagttggccatatttctctgctgcaaaattactgattttccttttgtaattaataagtgtgtgtgagtagattcttttgagatgaagtatatatcttgttcttccttgaacttaaaggtttttttttaagtgaaagcaaatttgttaagaaagtaaaggaataaaagaacggctactccataggcagagcagtgtcactttaaggttatgacgtcaagtgatttttgtacaaatcaataattactgtgatgattgaaaaaagattattaccaagtttattttcattgtctcaaggtcttctgaactctggatctaggctgtgtcaacagggtagtgtggtaccccctgtacccgtctctgcctcctacagtccttttcatttattttgtttttttataatagaggcagagtcttgctatatgttgtccaggctggtttcaaactcctgagctcaagcaatcttcctgccttggcctcccaaagtagtgggattacaagtgtgacccaccacatctggccaagtcctttaccatcttcagaaggcttagcttgcagtttcagcagaaggatagactcccaggaagaccgtgagacagatttggggtccagttgatattatcaagtacactgaatttgactgtgttcaccacgttctggctccagagaaatgagagtcactagtgaagttggtgccattttgtgtatcttctgcacctaaggaggaaaaaagatagaggaaagaatgtaagagatcagcttatattcacaaacatggacgtcagccttttcccaccttttctttttttttttttttagacggagtctcactttgtcgcccaggctggagtgcggtggcgcgatctcggctcactgcaagctccgcctcccgggttcacgccatgctcctgcctcagcctcccgagtagctgggactacaggcgcccgccaccacgctcggctaattgtttgtatttttagtagagacggggtttcaccgtgttagccaggatggtctcgatctcctgacctcgtgatccgcccacctcggcctcccaaagtgctgggattacaggcgtgagcctccatgcccagcccccaccttttcaatccaatatggaacctactacctcctgggaaagccatgcccccgctgcccctggcagaccacacctgaggattcattcctcctctcactcaatcacaccttcaacagaagtgtattgagcgtttcctttgtaccaggcactggggatacaacagtgaatttgtatccatggggttgctggaatccagttggaaagtgggcagtggattcttcagaaggttcataggcctgggaagagtctttggggactgtgagcaaccccatggtaccgtggagcacttgagtggggatatcctccacctcccaggaggagctgtcggctccaccatgacgaagcactggacatccaagggctccgcttgtgaaccacattggaaacaacaggctagttaccttgcagtccctcaggaatcttgccctgctcttcttgttctaaggacgccacaggttccctttttctctggagaagtaatctagatcttcgattttggaaccaaatctaagtggtaagacaaagaaacttaatttaaacaaagaatgttgtgtaaaactcatgattgctttcttctcttttttcttttctgttttttgagacagcggtctctctcagagtagctagtgccacagctgtgcatcatcaccttaggctaacttttaaactttttgtagagacgaggtttcaccacgtggcccaggctgatcttgaacttctgagcacaaccaatcctcccaagtagctgggactagaggcacacttgactgtgcccaacccaagatagatagatagatagatagatagatacttttttttttaatacggagtctcactcggtcacccaggctggagtgcagtggcacaatcttggctcactgcaacctccacctcccaggttcaagcaattctcctgcctcagcctcccaagcagctgggattataggcgccaaccaccatacccggctaatttttgtatttttagtagagatggaatttcaccatattggccaggctggtcttgaactcccgacctcaggtgatccacccacctcagcctcccaaagtgctggcattacaggcgtgagccaccgtgcccggcccaacattattaacattttatgacatttgtgagagtctataaggcctaaagagaacacccaaaattctgaaactcacacccagtccctttgtgataggttttagatcctgaaagttcacaggtccacctcattacaataccggtgtttctctaaagtgacatgctacattgcagctcttccttctgcctgaaatttttttttctatctctttttcttcccctcagaaatgcccattttacttccaattcccagaatagagaatgtctaggaaaacattcttcatcccacaagacaaacttaatttctgttccttctttgtgcccatagattatacacataggcatgtaaaacttatgcatatatactcacataatttgaaatagcagttcatatatacttgtacgcacacactcacaaaaatccctcaccttccagcagctactatatttttgagacaaaatctcactctatcgcccaggctagagggcagtggtgcgatcacagttcactgcagcctcaacctcctgggctcaagtgatgctcctgcctcagcctctcgcgtaactgggaccacagccatgtgccagcacacccagctaacttttaatttttttcatagagttgtggtctccctgttcctcctgcctcagcctctaaaactgctgggattccagacatgagccgccgtaactggccacaactctttttattttgagacagagtttcgcccttgttgcccaggctgaattgcagtggcgtgatctcggctcaccgcaacctccgcctcccgggttcaagcaattctcctgcctcagcctccggagtagctgggattataagcatgcaccaccatgcccagctaaatttttgtatttttagtagagacggggtttctccatgttggtcaggctggtctcgaactcccgacctcaggtgatccacccgccttggcctcccaaagtgctgagattacaggtgtgagccactgtgcccagccacaactcttaatagtgtgaaaatggcagttaagtttcaacattggttttggaggagacaaacattcaaaccatagcaatcactacctagtacagtacctagcacatagtagatgctccgaataatgcaaaatgaaagaaggacagaatgaaaaatgaacacgagacgaggaaagtaaaacgaaagaaccatcagaactactaatgtgcattcatgtcctgcttacaggagggagcactggtttaaacgcacacacaccctacacagcagtctgacaattttattccatttcaagatgtgtcaggaatgaatcctcggacagactggtacatttctctgagctaaatgttaaatgtctaaagtggacctcataattttttttttcaagacggagtcttgctctgtcacccaggctggagtgcagtggtgcaatctctactcactgcaacctccacctcccagattcaagtgattctcctccctcagcctgccaagtagctgggacaacaggcatgagccaccgtgcccggttaatttttgtatttttgtagagatggggtttcaccatgttggccgggctggtcttcaactcctgacctcaggtgatctgcccacctcagcctcccaaagtgctggcattacagacgtgagccaccgcacccagcctggacctcataactctaacctcagggcataattagaagatctgaaggatacagtagacataaagacttcagtcaaataggccgggcacggtggctcagccctgtaatcccagcactttgggaagccaaggagggtggatcacctgaggccaggagttcaagatcagactgggcaacatggcgaaaccctgtctctactaaaaatacaaaaaatattagccaggcgtggtggcacacacctgtaatcctagctactcaggcagctgaagcacaaaaaccgcttgaacctaggaggtcgaggtggcagtgaggcaagatttcgccgctgcactccagcctgggtaatagagtgagaccccatctcagaaaaaaaaaaaaggctttagccaaatgcctggcttatatgcaatgttaactaatattcactcactcaacaacttctcattgggtgtcacgtgccacgcactgttcagggcccaaggaatacaacattgctcaagacagacagaaaataccagaaggggatgtgagattgagtcctgtgggcacctgggggtagaagccagcagacagggaacagctgtgaaagaccctgaaatgtgcccagcatgatgaggaactgcctgaggcccatgtggcttcccttcctgtatacctagatccctaggagatgggacaaccaccttcttatcactcacttggactcttgactctggaacaccgatttctttagcaagttcttctctggaatcaatcccaggatatgggtttttcataaatgccttgatgagagtgtgtaactgagaggcgctgtaggtggtacgacaccgtctggcttctctacctagggaaggcatggaaagatggaggggggcggtcaaggaatattgcaagggtccattcacatattcaaacacagaacccaaacttgtcactctccctccaatttcgatcccactgactcctcctgagaggatcttgtcccaggttccttccaggtggaaggttctagaggagacccaggatgatatgtctgggcttctggactccagtagaaagaaagtaggcaagaggccgggcgcggtggctcacgcctgtaatgccggcactttaagagactgagagggggcagatcacaaggtcaggagttcaagaccagcctgaccaatatggcgaaacctcgtctctactaaaagtacaaaaattagctgggcatagtggcgcgcacctgtaaatcccagctacttgggaggctgaggcggaagaattgcttgaacctgggaggcagaggttgtagtgagccaagatcaagccactgcactccagcctgggtgacagagtgagactccatctcaataaataaataagaaagcctgggaagagggcaggggagaacttctagggtacgatgaaccctttgccaccataagaccctgaacaggaggtcatcagggaggagacattcttttttcaaagtcgcagttggctccgccgtagagaagctctgctggggaacagaactaagagggttatttactttgaaactccacaccaggttgatcttgcccctggctctggcttgattctaaagtctcagcttctggtcttttctggaatccgtgcctagctcttcgattctgaaaccaaatctaagtgaggaaaagaaaaggagagaattacgtgttaatgtcatttaagctacatcactgcctgttcccaaagtgagcaattcttattgggcctaggcccaggattattacttacttctgtcacattctaccaagtccttttttttcttttttgagatagagtctcactttgtggcccaggctggagtgcagtggcgtgatctcggctcactgcaacctccacctcctgagttcaagtattctcctggctcagactcccaaggagctgggattataggtgtgtgccatcatgcctggctaatttttgtattttcagtagagatggggtttctccatgttggtcaggctggtctagaactcctgacctcaggtgatccacccacctcggcttcccaaagtgctgggattataagcatgacctaccacgcccagcccatctaccaactctttggtcaagacttggcattcacacccagggcaacattgtgtgacaccataatctctactaaaaacaaaaaagttaaaaaaaaaaaaaattagccggccaggtgcagtggctcatgcctgtaatcccagcactttgggaagccgaagcaggcagatcacgaggtcaggagttcaagaccagcctggccaacatagtgaacctcagtctttactaaaaatacaaaacaaaattagctgatcatggcggcaggcgcctgtagtcccagctacttgggaggctgaggcagaagaatcacttgaacttgggaggcgggggtttcagcaagccaagatcacaccactgcactccagcttggacgacacagcgagactctgtctcaaaattaaaaaaaattagctgtggtggcacatgcctatagtcccagctatctgggaagctgagggagggttgcttgagaccgggatttcaaggcttcggtgagccttgattgtgcccctgcactccagcctgggtgagacagtgagaccctgactcaaaaagatgaaaacaaaaataaaaataaaagattgggcattcagcatcttcacaatctgctgccaacatgatttgctctaattattaatatttaattggtaaatagctgctacaattattacatgtttaaaagccagctcaagtatctccttctctgaaggtacgcctacacgtgttctctcacctcctgtgagctcgctcatcctcagtatccacatctgtgaagtgaggctaagaccaacaccttcgtgggtttattgagggtcagttgagatactccctaccaagccctcagcacatgggtacatagtatgggctccgttaatggttctctctcctgcctttttacttccagtcctggagatattgaactttaacttacctggattctggactcttctgtattgatttctaaagcaagtttttgtttggtagcataacctgggtaaggcttttgattgaaggtattgatgaggattttcaactgttcttctgtgaattttgtgcgacagcgcctatgatttgtttttaccatctctgtaggaagattacaaaagaagaagcatgtaataggttaatttatatactcaaacttcaggttcaagctagtctctcacttcctcttcccaaatccactggaatccactccaggagaactaccctcatacaagtatggagctcttgaacacacaatggcgatttttcaacttctttagctcatctgaatgccatactaagaagtcagggatcctctgttttgaaaaaccattaaaaaccattgtgagccgggcatggtggttgacgcctgtaatcccagcactttaggaggtcaaggtggtcagatcatgaggtcaggagttcgagaccagcctggccaacatgatgaaactccatctgtactaaaaatacaaaaaattagccagtcgtggtggcgtgtgcctgtaatcccagctactcaggaggtggaggcagcaaaatcgcttgaacctgggaggcggaggttgcagtgagccgagatcgtgccattgcactccagcctgggtaacagagtgagactctatctcaaaaaaaaaaaaaaaaaaactgggcgcggtggctcacacctgtaatcccagcactttgggaggccgaggcgggcggatcacaaggtcaggagatcgagaccatcctggctaacatgatgaaaccccgtctctactaaaaatacaaaaaattagccgggcgcagtggcgggcacctgtagtcccagctactccggaggctgaggcaggagaatggcgtgaacccgggaggcggagcttgcagtgagccgagattgcgccactgcactccagcctgggtgacagagcgagactccgtctcaaaaaaaaaacaaaatgaagtaaaataaaaaataaataaaaataagaatatgtatgtcatgaaaatgccaataattttttttaaaaaacaatgtgttctgttcatatggattagaaacaatctaagtcaagaatgcatgcaatatgtcattgtagtgatgaaaccatagaaacgaagagtttgtgatacaaggaccatttcaacccctttcagtttttcaggtcaaaattccttggtattttatttttattggcatatattttatttttattatttttattttttcaggcaggatctcactctgttgcccaggatggagtgcagtggcgcaatcatggcacactgcagctttcacctccacaggctcaggtgatcctcctacctcagcctcctgagtagctgggactacaggtgcacacccccacacccagctaatttttctactttttgatagagtttcgccacgttgtccaggctggtctcaaactcctgggctcaaaagcgattccccagccttggcctcccaaagtgctgagattacagatatgagccaccacccctggccggagcatattttttttactttgacctccattgctcaatagcaataacaggcaaacagtaacagtttccaaggtatttttaaaaacaccacagggaggacaaaattagctggaaaaagaatttcatactttcagtggaattttccaataggaaaaaaaataccacatcacataatttgctggataggacatctccttgaaataaccaaatctggaaagcattttggaagataccatttcgtaacagaattagacttagtgaattgagataagaagaaaatttactagagatgctagaagttcagttaaaagaccaacagcttttttgtttgatctttgaatgcttgcccttgtcttcagtttcacacacctggtccattgttttgttttttgttttttgttttttgagatggagtttcactcttgttgcccaggctggagtgcaatggtgcagtctcggctcactgcaacctccacctcccagattcaagtgattctcctgcctcagcctccaaagtagctggggttacaggcacgtgccgccacgcctggctaattttttgtatttttagtagagacagggtttcaccacgttggccagactggtctcgaactcctgacctcctgatccacccaccttggcctaccacattgctgggattacgggtgtgagccactgcacctggcccctggtccactgtatttcactgaagggggaagtttcaacttttacaagctcaatgaattggctcatacaatccacctttgacattacccatcattcctcttgaaccttgacctcatcatacgcgacattccataccttgacctcatctccttgacctcatcatacgcgacattccacttggctttatatgttgcaatgtgtactcctgccatgatatctaacttccatctgacccccaacccggccaacttcttccttctccagagttttcacttgctcctccgtctacccacaaggctcttcacacgatgatggatgagatcaccttgctcaggtctcagcttgcacaccatcttctcagagtccctccctgaccctccggtctaaggcagtccacaccccatgctatgacctctcactttaccaccatgcttagctaagtttttgatgttttgtagagatggcctttccctaggttgcccaggctgtatgagactcctggcctccccatacaatcctcccacctcagccacccaaagtgctggaattacaggaaagagtcacatcctctctcttttttttttctttgagacagagtctcactctgttccccaggctagagttcagtggcacaatatcggctcactgcagcctcagtctcctgggttcaagtgattcccctgcctcagactcctgagtagctgggattacaggcacctgccaccatgcctggctaatttttgtatttttagtggagacgtggttttgccacgtaggccaggctggtctggatgatccacccacctcagcctcccaaagtgctgggattacaggtgtgagccaccatgcctggccaatttcttaaacttgtttaaagggtagttgtcacatggagtctgaaaacatatcaatgaacttttcttactgcgttatattaaaatacatttttgtcttacatttttttcaagtttccaacccattatcttacattttgaatggctcttttacctatcgatgattttgtagcctcttgcattgatcatttaaaataacagtttagactgggcgtaggtggctcacacctataatcccatcaccttgagaggccaggacaggtgggttccttgagtccaggagttcaagactatcctgggcaacatagtgagacaccatctaactcattctacaaggccagtattactctgatactcaaaagcaggcaaatagacacatcgaaaaaggacaatatccctaatgaacactgatgcaaaaatcctcaacaaaatactagcaaactgaattcaacagtaaaaagataattcctcatgaccacatgggatttatcccacggatgcaaggatgcctctgtaccccatacatatatacacttactatgcacccacaaaaattcaaaatcattggccgggcacagtggctcacgcctataatcccagcactttgggaggccgaagcaggcagatcacctgaggtcaggagttcgagaccagcctgaccaacttggagaaaccccgtctctactaaaaatacaaaattagccaggcatggtggtgcatacctgtaatcccagcaacttgggaggctgaggcgagagaatcgcttgaacccgggaggcagaggttgcagtgagccgagattgcaccattgcactccagcctgggcaacaggagtgaaactccgtctcaaaaaaataaaattaaaaataatttttttaaaaaaggctagatgactgtaggattttggtggaaacaaaaattttttttaagataaaaaatatttcaaaataataaaaatgtgaaaggctagttttatgctagcaattcaaataattacatacatccttcttttccagacaagcatcctattccagtatgaagcacagggtttgatgcatatgtccctttgtgttacacaggatattaaaaaggtgtaatcaagggttaaagtttaataaaatcaataattgttactgcttaaggacattcctaagtgaaaccactttttgttcttgcactgaaagtatgagggtaaccacagtaactaccagtacaatttggttatactggtttgatgtcctctgaggtaccagcagatttacccatcattgtttttgtatcatcagtgcaaaagaaaaatgtcttagtataattaggaaaattgtgtcaaccttacagttcctggaaagggctctggagctccacaggccatactttgaaaacaagtgccctaaaataaatcttctattcttccgtatatttgtaagtaacaccacccctttcaaaagaccacttcataagatttacatagacctgccctgataccttgagaaattgatcctctctgcttttgtaattaacctcagaaagccactcctaaatccattttgcttttcctcaacttctacatttctggagtaggaaaaaaaaaaaaaaaatatatatatatatatatatgtatatatatatattcattcttttgactgaattctaatttctaacactttaccttctccacacaacaaacattcacttccagaaatggctaggtaagtcctagtagaattaaccagaatattttcatctaatttttcaagtgttaaaaaattattaacgcctattaaaagccagaccctggccgggcacggtggctcacgcctgtaatcccagcactttgggaggccgaggcgggcagatcacgatgtcaggagatcgagaccatcctggctaacacagtgaaaccccgtctctactaaaaatgcaaaaaattagccaggcgtggtggcgggcgtctgtagtcccagctactcgggaggctgaggcaggagaatggcatgaacccgggaggcagagcttgcagtgagccgagatcgcgccactgcactccagcctgggcgagagagtgagactcctctcaaaaaaaaaaaaaaaaaagccagaccctattctaggcaccataaacaaaacagttaagatatccttgatctttaaggagctgaaagatatcaagcaaacaagcaaaagatgtagtgtatcagatgatgagtatttccacggcaaagaagactcaagtggcaagagtagagagtgcaggggtgaggtcacagttctaagtgcaatagttagggatgggctcactgagaaagtataacatgaacaaaggcttgaggcacattagagagtgagtaatgctgacgtttgagagacattgcaggaggtggggagaggccctgggctgggacgctgcctgtcctatttgacataaggcaaggaggccagaacatctgaaaaaaaagaataaaagggaagcagacgaggtcacagaccataccaagcgccacgttatctagggcacgatagggccaagtgcctttttgttgaaggttttgagcagataagtgacataatttaatttatgtatgtatgtatgtatgtatttttgagatggagtctcgctctctggcccaggctgaggtacatggcatgatcacggctcactgcaacattcacctcttgggttcaagcaattctcctgcctcagcctcccgagtagctgggactacaggcgcccaccaccacgcctggttaatttttgtatttttagtagagacagggtttcaccatgttagccaggctggtcttgaactcctgacctcgtgatctgcccaccgcggcctcccaaagtgctgggattacaggcgtgagccacggcgcccggccgccataatttaattaacagtttaacaacatcacatgaggtacagcgttgagaataggttggtggaagcagggagatcagttaggagaagactgcaataatctcatgcaatgggccaataatctaatgagatggaccaagaaatggtcagattccttaaatatttgaatgttaaagccatcagaatgtccagcctgactgtgttatgggggaaaaaatggagtcaggggtgttttctagatatgaggcatgacctggcacctcctgagctggagaaaacagtgcgaggaatagtttagatatgaacatagggaattcagtttttggaacacattgagtctgagatgcctgttagagacaagcaggcaattagatgaagtccaaagttcaggagaaaagttcaaacattctgtagagagaaatcaggaaagtgctttccagatctggaatccttgattccaaggatattttgagctctgaactttgtgatgtgtcccatagttgctctgttttagcatctgtctccctctcctttttttcttttccactccttcctcctctcttccttcctgaagctcaaatatgtcttatttagttcttgaatatctgtacctttctgaaattcccaatgctcaaatgcactgaaaacagcctattttcataatatcacatcagagaaaccggttttcccctatccagatacagttaaagtttaaaaatggaactctcacaacttctgacaagaccactgggtttttagccctactttttccccaaaccaacaaaagctcagtcaagcacaagggaacttactgtgtgaataggtgtcttcggccatgctggaagagagtcctgaaggctgagccactgtctgggagacaagtcactctgcgcagagactgggttttatatgcgtagccaggtggtcccgcccacttttttaaaccatttacataaatctctagttccacccttagtaattgtatcactccttagaaacatgtatcctccatctaaaaaggactagataggacccctttccgtcaattgatatttaataatttacaccagtgtataaattattaccaacccctacacctaagccatcacaagaagaacatttcggcccatgccaactcacatacacagagtcatgctccttggctcccccaacccccttgtgggaaaaaaattcgtcccaaatcactggaacctgaacagggagacaagcttgcaatagttgccaattttttaaaaaagaatatttttgagtactattctgcttacacatatttttcaatgcttattatatacatatagtcttttgtaaatggggtttttatgctctccacctatcttttgacatagtggcctctccttataaattaaaagtgttatttctaattagtatcacataagagtgaggctagtgagacaggaacaaaatttaaggtggtgctaaaaattctgtgatcaagataaatagtatttgaaagcaatgtatattttaagtaatgtaaaaagtccatcttaacaaaacataaagattgtaaataaaaagaagatcccaccctgcacgtgcacgaccctgcaagttatgcaagtgagggtacctgcgcattgaaaaaagatgtctcaccattgaccagtcattgatcagtcattgatcagtcttgagggaagctggctggtggctgtcactttttatagctgtaatctacaatagtgcaggataaaagggaaaattttattacatgtctatatttgtgtaattttttaactgttattaagagcacataaagaagtgatatgaatttcatttattgatatatttgactatccataaataaaatttggccagatatcaagccattttggagaaacaatttcgaaccaggaaaatgacatgaaataacatttaacaggaaaattttacactttatttaattaaaacaatgataaattgtttttcttttctgtatatgacatttcatcacaatattttttcaccaaatttgtctggaaatctagagcagaattttctgctgtttgtttatattgatgtttatattttgatgtaaattatatgtacatctacttgaacattagtattacaattataaatgtgctttaaattaattgacacaatattggatattcattataattatattatcattaaatatattatattaatatataatattaataatataatcttgatataccatataacagatatattacatattatatttactccagttaaatattatatttactttttagctttattgaggtacagttgacaaaaatgatatatatttaaatatacaatttgaattttgatatacacatataattgaatcccagattcaattaccataatcaaatcaagctgattgatgtatttaccacctcaaaccacaccctttgtgtgtgtgtacatatatattacattatattatatttactccaattattgtatttactttttagctttattgaggtacagttaacaaaaatgatataaatgatatatattttaaatatacagtttgaattttgaaatacacaaaagatataattaccataatcaaatcaagctgattgatgtatttaccacctcaaaccacaccctttgtgtgtgtgtacatatatattacattatattatatttactccaattaaatattgtatttactttttagctttattgaggtacagttgacaaaaatgatataaatgatatatattttaaatatacagtttgaattttgaaatacacaaaagatataattaccataatcaaatcaagctgattgatgtatttaccacctcaaaccacaccctttgtgtgtgtgtacatatatattacattatattatatttactccaattaaatattgtatttactttttagctttattgaggtacagttgacaaaaatgatataaatgatatatattttaaatatacagtttgaattttgaaatacacaaaagatataattaccataatcaaatcaagctgattgatgtatttaccacctcaaaccactccctttgtgtgtgtgtacatatatattacattatattatatttactccaattaaatattgtatttactttttagctttattgaggtacagttgacaaaaatgatataaatgatatatattttaaatatagtttgaattttgaaatacacaaaagatataattaccataatcaaatcaagctgattgatgtatttaccacctcaaaccacaccctttgtgtgtgtgcatatatgttacattatattatatttactccaattaaatattgtatttacttttttttttttttgagacagtgtttcactcttgttgcccaggctgaagtgcagtggggtgatctcaggtcactgcagcctctgcctcccagattcaagtgattctcctgcctcaggctcctgagtagctgggattacaggcatctgccaccacgtctggctaattttttgtatttttagtagagatggggtttcaccatattggccaggctggtctcgaactactgacctcaggtgatccacctgcctcggcctcccaaagtgctaggattacaggtgtgatccactgccctgggccttgtatttactttttagctttattgaggtacagttgacaaaaaagatacatattttaaatatacgatttgaattttgatatacacatataatatgatatggttaccataatcaaatcaagctgattgatgtattaaccacctcaaattataccctttgtgtgtgtgtgtgtgtgcggtcagaacactttttaaaaaaaatatccttttctcccccatgcagaagaacacttaaggtctatccttgtcgcaaaaaataaaaatctatcctcttagcaaatgtcaagtagtattgtttttttcatttctgatcatccaatttaaaatttttttttctaatttgttaactatgtcacataatgtcacaatgtacatgtcaaataacgtcactatgtaccttaaatccccaaaacttatcttgcaaaactgaaaatttgtacttcttgaccaacatttccccatttccccttcactcaagcccccggcaaccaccattttactctctgcttctatttttgatccaacctcactgtttgtgtccacgctccttaattttcttggtcatgagaccacgagcttagataacaccttagacaatgagaccagtgaccctgacctgtttcagtttagttatttaaaatatttttctttcttttttaaattgtatttatttatttatttgttttgagagggtcttgctctgtcgcccaggctggaatgcagtggtgcaaccatggctcactgcagcctccgactcctgggctcaagcgatcttaccccctagggctccaaaagtgctctgacagtaaatgcatgagctaccatgcccagccatcaaattttcaatcattataaatcttagagctggaaataatatctcattgttttatttttaatttgagcgctagcgtgcttgaacacttttaatcaaatgtatttgccatattttatttttcttttattagctttcagattctttgcttctttcttaggtagaacatttctttgagacttaaatattatgctgcatttgtcctatgtcctgcaagtgttttcttaattcagtattttaaaataatattttgtttttatgttttttgtatctttatagcattcttctaaattggatctatgtttattttaattgtctagtcaaagtactgacaaggaggagtgaacttcctgaaaacggagaacaagatgtgatgccttttagtaaatgtttaccaaaagacacaggattccatttccaattccatatcgagaacctttaaaattgtacataaaaatgcaggtgaagtcgtggagaagggaggccaacagtgcacacaggtagtgcctctggggaagaatcagaagtcatcctgcatcctaaattcctgacctgacttttctgcagggcgagtatctgacctgtgctacaccatcagcaacacaaagaaaacttgatgagcttttatttccttttatttgtatgtttcactccagttttcaattccgtgccctcaaaagcccggatatcatcaccggtacctcttttaagcttcacctctctgtgcggctccgcaagtatgttggtctccctgagagagtggggcctgcaacctgctgggcgcaggcgccttgagctgccacgtctgcccttttaccggcttgggtgcaggcaagggaaatgcgtccccgggccggggggcgcgagcgggggtccggggccgcgagctggggtccggggagcgcgagcgggggtccggggggcgggggccgcgggccgcgaggggggcgggggccgcgagggggcggggcgtgcgagggggcgggggcgtgcgagggggcgggggcgcgcgagggggcggggcgcgcgagggggcggggcgcgcgagggggcggggcgcgcgagggggcggggcgcgcgagggggcggggcgcgcgagggggcggggcgcgcgagggggcggggcgcgcgagggggcggggcgcgcgagggggcggggcgcgccgggctcgtcctctccgcggcgctcagtggcagcagggagggccggtgagatgccagagcaaggtagggtcctgtatttggggaccgctgacgtttgggtccccctcccgcggctgttagcgctgcgtggcccgagacctgcggtcgggcggggattaaggctgctttccggagggccccggccgcgtggtcgccctgccagagcggttgatgtcaggcagtgctgggaggcgttgctctccgggttcgcttctctcctgttgtcctaactctgcatctctcccgggtgaatcacagagctgtaaactaaaaatcaaattctaagctcccagccaactgaatggacccctcctctcagctaagagcatggcaaacttaaccggaaacactagttcggccgcgataggaaggagatgggacatgcctcattttaccctcctctctttgaaattcaggcacaggtcgggcgcggtggctcatgcctgtaatcccagcactttcggaggccgaggtgggtggatcacatgaggtcaggagttcgagaccagcctggccaacatggagaaaccccgtctctactaaaaatacaaaaattagccaggcgtggtggcgggcgcctgtatcccaactactcaggaggctgaggcaggagaattgctttaacccgggaggtggaggttgcagtgagccgagatcgcgccactgccactccagcctcagcaccagagcaagactacgcctcaaaaaaaaaaaaaaaaaaaaaaggaattcaggcacagctgaccagtattaacattaaaacaatttttttttagtatcttcatgctaaaggggtaagtagaaattgcatgtagcctcccatcagtttattccaaatagcaaacatttaccaagccctgagttattaactacgtattttctttttgtaaaccttacaattgagcaggcaagtaataacattatctccatatttttaatgtgaggaaactgaggcccaggaagacgtgtaatttgcccaatatcaggtattcagtatattggagatttgaaggacaagttatttattttgaaaaatgtataccttttccaaagttccaacaataattcaatgaacacatttattttgccccagaattgccaatgatgttatgtcctataaggaggcacctaagtatacagtttgtccatttgggagatttggattttgactacttggttaagatggtatctactagatctctccactctttcttctttgtaattaataagtaatctgtgggtcaattctttgcaatgtctgaataatattaagtccccccacttcagcctctagttttagcctctgttgatgattcttccctgaatctgtgatcactgcttgtggggattctatttctattacttctttacattttatacttataagttgacactcctgtaaagaactttacccatcccattcttttttcttttctttttttttgtttttgagaaagagtctcactcttgtcatccgggctggagtgcagttgcgcgatctaggctcactgcagcctccgcctcccgatttcaagtgattctcctgtctcagcttcccaagtagctgagactacaggcgtgtgctaccacacccagctaattttgttttttttgggttttttttttgtttttgtttttgtttttttttagtagagatggggtttcaccatgttggccaggctggtctcaaactactgacctcaggtgatccacccccctcggcctcccaaagtgttgagattacaggcgtgagccaccgcgcccggcccacctcaggtgatccacccctctcagcctcccaaagtgttgagattacaggcgtgagccaccacgccgggcccacctcaggtgatccacccccctcggcctcccaaagtgttgagattacaggcgtgagccaccgcgcccggcccacctcaggtgatccacccctctcagcctcccaaagtgctgagattacaggcgtgagccaccgcgcccggcccatcccatcccatccattttaagttagttaattattttagaagccacatggagtggatgatttttatctgcggcattataatccatttatctcattgtattggtgctcacactacccagcattagcctctccaaactcaagtaggcttgactttcttatttctatcacagagctcctgaaacccttggaatttcctgtgtgttgaaatgtcttttgttatttttaatgactttttgatcacatctcagtttataccaatgagatggcttagggtggagaccctagacagcctcaagatgaagctggtcaccagaaagattagagagttggaactttcagtcctacccaccaacctctgtgaagtggaaagggtgggatggcttgacatgaagctctataaaaactcttggacaacaagattttagctttccagattgctgaacacattcagtgttcctggagagggcatggaagctccacacctcttctcacataccttgccctgtgtatcttttctgactgtttgtttgtatcctttgtgatatcttttattataaaacagtaaacataagcaaagtgtttccccgagttctatgagccattctagaaatgagttctagggggttgtgggaaccccaattctaatgtagttggtcaaaagcacaggccacaaccaggtgattgtgactggcatctgaagtgaagggcaattctgtgggacttagtcctcaacctatgggatgtgacacttccttcaagtagatagtgtcagatttgaattataggacacctactggtgtctcctggaaaactgggatggatgaaaaaacctccactcatttggtcacacaaatgttctgttttgagtgagttgaaagaaaagaacagttagtttttttgctttagatgtggtgtcagaaatgggatgttgaatgattgtgtaagagtgggagcacttggcagagaagtcaaagatggcggctgtagctgctgttcgctggctggggctctgcagcaggcttgaccagccactgacgggtcagccagcaggtctatgtgaacaagcacacagctgagattttattctggaagtgcaaccctctcaaatattgaaggaactgatataacagggattgaagaagtagtaattccaaaaaagaaaacttgggataaagtagccgttcttcaggctcttgcatccacagtaaacagggttcccacggctgtaccttgcgtgtttcaagataatccttacctcataccaacatcctcttcagaatctcgttcatttttactggcaaagaaatccggggagaatacggccaagttcattattaattcatactccaaatattttcagaaagacatagctgaacctcatacactgtgtttaatgcctgagtactttgaacctcagatcaaagacataagtgaagccactctcaaggaatgaatcaagctcagaaaagtcaaagtctctgtggacatgtttgatgagcttttgcaagcaggaaccactgtgtctcttgtaacaacatatagtctcttggatttattgtgttactatggtgaccaggagccctcaactgattatcagtttcaacaaattgaacagtcagaagaattggaagaggaaaataataagaggtctaggaggaaagctggtgatcaatttggagttacctggtgagcacaaaacaacgctgagagaatgttttctctaatgccagggaaaaatgcacattcctattgcacagtgatccgaggaatggtgaagcatcaagcttatgagcaggcattaaacctgtacactgagttactaaacaacagactctgtgctgatgtatacacatttaatgcagtgattgaagcaacagtattggtgataaatgagaaatttgaggaagaatggaataatatactggagctgctaagacaaatggttgcacagaaggtgaaaccaaatctacagacttttaataccattctgaaatgtctccgaagattttatgtacttgcaagattgccagccttacagattctatgtgaaatgaaagccatcagactagaaccctcgcttgcaacatatcaccatattattcagctgttttatcagcctggaaacccttcaaagggatcatctttcatcatctatgatataatgaatgaattaatgggaaagagattttcccccaaaggacctggatgatgataagctttttcagtcagccatgagagtatcttcatctctcagaaatctagaacttgcgtaccaaatacatggcttttttttttttttttttttttttttttgagagagagagtctcgctctgtcacacacgctggagtgcagtggtgcaatctcgcctcactgcaagctctgcctcccgggttcacgccattctcctgcttcagcctcccgagtagctgggactacaggtgcccaccaccacgcctggctaattttttttgtatgtttagtagagatggggtttcacagtgttagccaggatggtctcgatctcctgacctcatgatccgcccgtctcggcctcccaaagtactgggattacaggcgtgagccactgcacccggctacatggccttttaaataccagagacaactgaaaattcattggacctgataaacggcataattcctattattccatgttcttcaatttgatttgtctaatggaacgaattgatgtcaccttgaagtggtatgaggacctgataccttcagccttctttccccactcccaaatgttgatagatctccgagcattggatgtggccaactggctggaagtgattactcaaatttggaaagatagtaaagaatatagtcacactttctgcaacaacctgagagaagagatcctgacactcatggcaatggataagcacccaccagagcttcaggtagcatttgctgactgtgctgctgatatcaaatctacgtatgaaagccagcctgtcagacacactgctctgaattggccagctatctgtctcaactgtagagctgtctttttttttttttttttttttttttgggacggagtttcgctcttgtggcccaggctggcgtgcaatggcatggtctcggctcactgcaacctctgcctccgaggtttaagtgattctcctgcctcagcctcctgagtagctgggattacaggcgtccaccactatgctggctaatttttgtctttttagtagaaacagggtttcaccatgttggccaggctgtctcaagctcctgaccccaggtgatccacctgcctcagcctcccaaagtgctgggattacctacatgagccactgcgctcagccagctgtcctctttttaatggctgggagaatccaggaagcctggaaaatgttggggctttttaggaagcataataagatccctagaaatgagttgctgaatgagtttatggacagtgcaagagtgtctaacagcccctcccaggccactgaggtagtagaggtggctcagcttacctatttgtgagggcctcacccagagagtaatgactgactttgcaatcaaccaggaacaaaaggaagccctaggcaacttcactgcattgaccagtaacagtgatactgacagcagcagtgacagcgacagtgacaccagtgaaggcaaatgaaagtggagattcgggagcagcaatggcctcagcgcagctgctggaatcacacctgagagcgagatatgctaatatttaacactgttacaaagaagacaagatacagattgggtgaatttgttactgtgagatacagtcagtacacagctgatttatgtagatttaagctcctaatttgcaacttaataactgtctattaatacaccattaaaggtttagcatttaagtagcaacatggccgttttcaggccaggcgcagtggctcacgcctgtaatcccagcattttgggaggccgaggcaggcggaccatgagggcaggagatcaagaccgtcctggctaacacggtgaaaccccaactctactaaaaaatacaaaaaaaattagccgggcgtggtggcgggtgcttgtagtctcagctacttgggaggccgaggcaggagaatggcgtgaacctgggaggcggagcttgcagtgagccgagtttgtgccacggcactccagcctggacaacagagcgagactccgtctcaaaaacaaacaaacaaacaaaaaacaaaaattgccgtttacagacacatggtgaggtccatcgctcttgtcatcaggataagcctgcaacctacaatgttggtgcgctgacctcgtgctgccgtcctcgtgtgactgccctctccctgctgccgtcctcgtgtgactgccctctccctgctgctgggtcctcatgcgattgccctctccctgctgctgggcttctgcctttgttggcctgatgtgctgctgtgatgctggtccttcatcttagaaaggtgttcatgcagttttatcacaggtggtgttgggtcaatagtttcccaatttcaggatatttccatgtcagaaatagtgcatcttaggaatgactaaacaggatattgttggtttaggctgcacaactgataaaatgactgtaaataaatgttgtaataaatgtagaaaaaagagtgggaacacttataaatatttggaaattaaaatagtgcctttttaatttgcatttttagattttaaaaataattatagagttgcagaaattataaaaaatagtgcagagttctgtgtattcttcatccagcttattcaaatgatgacatatttatatagtacaatgttaaaaccaggaaattgacattgctacaatctgtaggccttatttagagttaaccggttctctacatctctcgtttgtgtgtatatgcgtacttctatgcaattttaattttttctttttctttttttttcttttttctttttcttttttttctgagacagagtctcgctctgtcccccaggctggagtgcagtggtgtgatctcggttcactgcaagctccgacttccgggttcaggccattctcctgcctcagcctcccgagtagctgggactacaggcgcccgccaccatgcacggctaattttttgtatttttagtagagacggggtttcactgtgttagccagggtggtctcgatctcctgacctcgtgatccgcccgcctcggcctcccaaagtgctgggattacaggcgtgagccaccgtgcccggctgcaattttaatttttttaatgaagctgtaaagggagacttatacaatagcataatatccattattagtagcaaagtaacagtgtaagaaacagtacatcagacttagtcaaagggcaaacaaaagccaagtttggtgatcagggaaaactctgcatccccaaatgcttattgagtaaaatgaaggcctaccagtcaaaacaccacattaaaccagatgctggaaaaaggatggtgatatggtttggctctgtgtccccaccgaaatctcaccttgaattgtaataatccccatgtggcaagggcagggccaggaggagataattgaatcatggggatggtttcccccgtactgttctgacgatggtgagttctcatgagatctgatggtttcataaggggcttcccccttcacttggctctcacttttcttacctgctaccatgtaagatgtgcctgttttaccttccgccatgattgtaagtttccccaggcttcccttgccatgcagaactgtgagtcaaacctcttttctttataaattacccagtctcgagtaggtcttcatagcagcatgaaaacagactaatatagatgccatgctcctctaataccaatgttgctctgtgcatgtgtctttgtctatgtaagaaagaactgaaactagaaaagtagaaccattacatttagatatgtcctggctgtagtttggatgggtttggagggctgacacgataaaagtaatctgacagatgagagtaatgggtttagaaaaataaatgtgttggctgggcgcggtggctcatgcctgtaatcccagcactttgggaggctgaggcacgtggatcacgaggtcaggagatcgagaccatcctggctaacacagtgaaacctggtctctactaaaaatattaaaaaaaaaaaaaaaattagctgggcatggtggcgggcgcctgtagtcccagctactcgggaggctgaggcaggacaatggcgtgaacccaggaggcggagcttgcagtgagccgagatcgcgccactgcactccagcctgggggacagagtgagactccatctcaaaaaaaaaaaaaaaagaaaaagaaatttgtttctaatgtgcaggtttaattagagtggaagatgtcaataaataaggttttagccagacacggtggctcatgcctataatcccagaaatctaggagaccaagacaggtggattgcctgagtttaggagtttgaaaccagcctaggcaacatggcagaaccctgtctctacaaaaaataccccccaacaaaaaaattggccaggtgtggtggtaggcgcctgtagttccagctaccctgcaggctgaggtgggaggatcgcttgagcctgggaggcagaggctgcagtgagctatgattgtgccacttcactccagtttgggtgactaaataaataaataaataaataaaatacaataaaataaagaaaagaaaagaaaaagaaggaagattttaaagataccattgagtagcctagagcgctaaactctgatctgcttctccttacctaacccttttgggttttttgtttgtttgttttttgtttttttgtttttgtttttgttttgagatggagtcttgctctgtcaccaggctggagtgcagtggcatgatctgggctcactgcaacctctgcctcccaggttcaagtgattcttctacctcagcctcccgagtagctaggactacaggcaggtgccaccacacctggctcatttttgtatttttagtagagacggggtttcaccatgttagccaggctggtctcgaactcccaacctcaggtggtccgcccacctcggcctcccaaagtgctgggattacaggtgtgagccaccgcacccggccaatcctttcttgttactttcctttaatgcagagtttctcaatcttggcattgagaatgggatggataatttttggttgcagtgggacatcctgtgaagtttaataactttaacagcatcactggcctctttttagtacataccagtgaggcaggataggtagtcaaggagtgaccatatcctggggacgcagcaaccagggtgtccatacaatcaacacaataagcctcagcattcgagtggtagttcagctcattcaagcaaagctttcttcagcagggaatttcacctgtaggaacatgtgcgctttgattttacctttcctcagacaccctttgctcattataatagtaaaaaacaggccgggcatggtggcttacgtctgtaatcccagcactttgggaggccgaggtgggcggatcacctgaggtcgggagttcgagatcagcctgaccaacatggagaaaccccgtctctactaaaaatacaaaattagccggcgtggtggcacatgcctgtagtcccagctattcaggaggctgaggcaggagaattgcttgaacccgggaggtggaggttgcagtgagctgagatcacgccactgcactccagcctgggcgacaagagcaaaactccatctcaaaaaaaaaagtaaaaaacacacccatgggtggcgatttaagatgttaatgagacatgtgacgtatgaacaagtgtgtacagctactgcacatgtgcacccagaggagcacccagaacatggttactagtaacacctctttcccacctcctcatgaataatcatggaagtctgccataaagggaatcccccagcaccagtctttgctgtctaatccttaggagcaccccagcctgaattctctctctcagggtgtattgtctatttttcacctaattttcaagatattctttttgctttacaataaattactctgtgctccatctcttgctgtgtgattcttatttaagttcttttaaactaagaagacaagaactgaggtatcacaacaccatcaacaccagtagcacctcccatcccgaatatatgttagtgaaaaatgtctctggattttgctaaatgatccctggaccatgacactgacccattgcttgcctggctccatcatgctccaggaggagtgcaattgagtctttgaggttgttagggcttgtaaagtttggaggctttaagttgtacctgcaccagttttggaggtggacacacacatttggggatgctaggactctgttcctcccccaacccccagacttttaaggcaccaaggaatataaatatcatttattattttccaggcaggtgccaagccctttttatttaatattccatacaaaatttgaaaaattaaaaacaacctaaagtggagatttctacctctactttttcagatgagaaaattgagaaatcaaaagttctgagactcattttttaaattgagctcatatgttttgagtgtttcttatgttgccagatgtcaatggagtttctgggatctgaggggatgtgggaaaaacatcgtttctttttttttttttttttttttttgaaacggagtctcgctctgtcgcccaggctagagtgcagtggtgcgatcttggctcactgcaagctccgcctgctgggttcacaccattctcctacctcagcctcccaagtagctgggactacaggcgcccgccaccacacctggctactttttagtatttttagtagagacggggtttcaccatgttaaccaggatggtctcagtctcctgacctcatgatccacctgcctcagcctcccaaagtgctgggattacaggcgtgagccaccatgcccagccgaaaaacatcgtttcttagttgagttataattaatattgagagcattaaatttatgtagaaaaatcatttttccttaaatcctcaaagataacaaacaagcataaaaatcatttatagatttagtatttttctgttaaaatcatttactcttctttgtttttgggtcagtgttcaattggtttatacctttgatagttgaaatttacttactgaatactgatatcatttgtgggtcctggtaaatatttcaaagttgtcgtacaaacaggacaatagattctctcaactcttcaaacgtctaacatgacagacttataagtcttttttcttcttttttttttttttttttttttttttgtagagatggggtctcgctatgttgccaaggatgatcttgagctgctgggctcaagggatcctctcaccttgaccttggcctcccaaagtgctgggattataggcatgagccaccacgcctagcctcttgcaaagtcttataatgtcgtttttaaactcttaagctgccaagtgtgggtggctcatgcctgtaatcccaacattttgggaggctgaggtgggaggatcacctgagcccaggagttcaagaccagactgggcaacatggcaagaacctgtctttacaaaaaattaaaaaataaattagctgggcatggtggtacacacccacagtcacatctacttgggagggtgaggtaggaggattgcttcggcctaaaatgttggctgggcatggtggctcacgcctgtaatcccagcactttgggaggccaaggtgggtgagtcatgagatcaggagttcgagaccagcctggccaacatggtgaaaccccgtgtctactaaaaatacaaaaaaattagccaggcatggtggcaggtgcctgtaatcctagctactcgggagggtggggcaggagaattgcttgaaccgggaggcagaggttgcagtgagccaagatcacgccactgcactccagcctgggcgacagagagagactccatctcaaaaaaaaaaaaaaaaaaaaaaaaaaaagtcaaggctgcagaaaactatggtcactccactgcaactacatcctgggcagcagagtgacctttaataaaataaaaacacccttgagctactctcgtaaacccagtaagacttacacatttaataaatcagattgtcttaagccttttgacatcctaaatataagcttatgcaaagcagcaacacacatgtaaaatataaaagtaacaaagataacttcaatacaattttttttattttaaaaattttttaagagttgggggcttgctctgttgcctgggctggagtgcagtggcaggttcattgctcactgcagcctgaaattcctgggttcaagtgatcttcccatctcagcttcccaagttttgaggattacaggtgtgagccaccatgctcagctcttaacaacttttttttttttttttttgagacaacgtctccctctgtcacccaggctggaatacagtggcaccatcacagctcacagcagcctcaacctcctaagctcaagcgatcctccagcctcagcctcctgagttactgggacgacagttgtgcaccaccatacccagctactttttaatttttttgtagagatggtgtctcactatgttacccaggctgatctcaaactcctggcctcaagcaatctttctgccttggcttcccagagagagtttttcagtccatcatttttcaggattgtgagccagggttccattagatcttattgagatatctcttgtgtgtctgctgtgtgccagacatggtttaaaagactagagatacaggccagggatggtggatcacacgtgcaatcccagcacttagagaggccgagatgggcagattgcttgagcccagaaatttgagaccagcctgggcaatatggcaaaagcccatctacaaaaataaaaataaaaattagccgagcatggtggcatagctgcatgtagtcccagctacttgggaggctaaggtggtaggatcgattgagcctgggagatcaagtctgcagtgaactgaggtcgcaccactgcactccagcctgggtgacagagcaagaccctgtctcaattaaaaaaacaaacaaacaaaaaaaaaacttaggatccagcagtgaacaaaatcatcactgacgcttaccctcatggagctaacattctggatgaaaagtcagaaataaacaataattataatacagaaatagacatgataagttaaccagtgctataacaaaaagaaggaaaaggagagtaaggtggatcagggtgtcagagtttggggagttgtttgcaattttcattagaatgatcaggaaacagcttatttagaatgtgacatagatcaaagtctatagggagatgaggggctgagccatgtggagattggggtaggaagtggatttcctgccacaggctttcaagcaagcatataatatccagggctgggtgctgtggctcacgcctgtaatcccagcactttgggaagccaacgtgagaagattgcttgaggccaggaattcaagaccagcttgggcaacatattaagacccccatctctattttttttaatcttttttttttttcttttgaaacggagtctcgctctgtcgccaggctggagtgcagtggcccgatcccagcttacttcaatctctgcctcctgggttcaagcgattctcctgcctcagcctcctgactagctgggattacaggtgtgtgccaccacgcctggctaattttgtatttttagtagagacttccccatgtttgccaggatggtctcgaacttctcacctcgagtgatccacccacctcagcctcccaaagtactgggattacaggtgtgagccaccacacctggccaaaataagccttttttactgtatttatttgaagattaaagatggtttaaggtgacaaggggtagagtatgattgccaactatatgtgtaaacttgtttaggctgtactacccagaaattgtattaaacactgaccagggtattgttatgaaggtatttcatagaaacggttaacatctataatcagttattttgataatgtaggtggttcttatctaatcagttgaaaggccttaagagaaaaacagggttccctggggaagaaattctgcctcaagactgcaccttcagctcctatccacgtttcaattctgctggcctgaactctagcctacagatttgggactggcctgtccctgcaatcacatagcccatttcttcttctatctttttttaaaatttttattgtaggcaaggtgggtggctcacacctgtaatcccagcactttgggaggccaaggtgggcggattatgaggtcaggagttcaagaccagcctggccaacacagtgaaaccccatctctactaaaagatataaaaaattagccaggcacagtggcgggcacctgtaatcctacctactcaggaggctgaggcaggagaattgcttgaacccaggagatggaggttgcagtgagccaagattgcaacactacacaccagcccgggtgacagtgccgagactctgtctcaaaaaaaaaaattattgtggaggaatggtctcactatgctgcacaggctagtctcttaactcccggcctcaagagccgggtctgtcctgtagaccctggctgagcgatggatgaaaggagtactcagacacaggtatgtagtgtaagagcagctaggggactgctgaagagtgagcagtcttgataagctgggactgcttgcttttattcagtacagacataatgccaaaagcctggagccaacacagtctgtgggtaattaacattattgttcccccttttgggggcagcctcactcgtgaatgatcaaatgttggttcctagttaacataagtaaacaagcctgtttatgttaaattcccctacacttccttgtacctactccttgccctctgccttagggtaagagaacagctgctttcagcttattctcccgtgaagctatgcagagacttctgacctttcagaaggtttgcgtccttttcttatagcttctcccaccactctgaccgatctcctacactcaagcaatcctccttcctcagcctcccaaagtgctgggattacaggcatgagccaccgcacaccacccccatttcttgcagtaaaatatgtgtgtgtgtgtgcgcgtgtgcgcgcgtgtgtattccatttctccctaataccatttctcagctgcatgaatccttaactcatgaaagatactttttatcctcttgactctacagttaatggaaaataaaaatcatcaatagtgacttctaagattgcttaatatacctttctgggaggacagttagaactcctaatgtgagcttgtcagtttcttgtgaaaaccaacccagttgtcccatagaactgatgtttgtggtttcttttgactgaacctagaaattgaccctcccactcttaaaacttgagaaaagtacatttgtcataatcgtttgtcacagaaataaccaaatttccttgtccattgttttttaactatggttgtcctaagacttttgtcatccacaattattgtttgactttgagtcttctccaaaggtggcttacagtcagctacagttcagggcttctttgagagagttcataaaaagaacacttgaattcaagtttctggtaactttggagattgtcctatcagcctagagagaaaacttccaggactctaattagaaggctgatatattcataaaatacataattatgtatacatatgtttatgcaatatgaagcagagcaggagtttcatggactgtactaatttatttcatgataaataaaaatattttattatatagtatattaagccatcttagaagtcactgttgatgatttttttttctccattaactgtggagccaagagggtaaaaagtatctttcatgagttaaggattcatgcagttgagaaatggaattagggagaaatggaacacacacacacaaacacagagatttatttcaagtactgaatttattttattattttttgtgtgtgtttgaaacattgctgattctttttgttttgtttttgagtcaggagaactttttttgtaaatctactttctgtctctatgaaacttttttctttccagctatttatagcctttaacaattgaatatacatttgtaaacaaaatttgagggctatttctctctctgcctgatttctccagaattcagaaactatttgtgaatattcttaattcacggcaatgtggttgtttgcatatgttcaataagaatctgttttctagctaggtgtagcatatgttcaataagaatctgttttctagctacttgggaggctgaggcaggaggatcgcttgagcccaggagtttgaggctgtagtgagctatgatcgtgccactacactccagtctgggtaaacaagcaagaccctatctctattttttaaaatccatattattttataacacaattgtaggcactgggtcttttcccaaggctttgacaggaatggcatatttttaactatgcgagactgctttgaggaattaagactgactttatgggccaggcgtggtggatcatgactgtaatcccagcactttgggaggccaaggcgggtggatcacgaggtcaggagatcgagaccatcctggctaacatggtgaaaccccatctctactaaaaatataaaaaattagccgggtgtggtggcaggcgcctgtagtcccagctactcaggaggctgaggcaggagaatggcgcgaacccagaaggcagagcttgcagtgagctgacatcacgccactgcactccagcctgggcggcagagcaagactgtgtctcaaaaaaaaaaaaaaaaaaaaaaaaaaagactgactttatggagctgatgggagcccttggaaggactggcctcatatcttgtgcacacagttcctttgtggggttcctggcctgtagtaaatacagtgtcattttctgataggcctaggaacctcaagatgttctggggcctcaagaaaaacgggtttcacccaattcatgcaggtatgtacaggtgcagacagatctttggctgggcttaagaggtctttgggtgttgagtctgagagattccttatgaggggttccagcaaagccaatttaggaggaattgtataaacagtgattcttgctgtagtttggataagtatggtgggactgaagcttgttttgcaggtaagttgttcctgctgtgatttgcttttgatggaagtcagggactagagagagaaaaactgtttccaaagaaaactatagtgctgccaggtgcagtggctcaactttgggaggctgaggtgggcggatcatgaggtcaggagtttgagaccagcctggccaacatggtgaaaccccgtctctactaaaaatacaaaaattagccaggcatggtggtgggcacctgtaatcccagctactcgggaagctgaggcaggaggatcgcttgaacctaggaggcagaggttgcagtgagcggagatcgtgccactgcactccagcctaggtgaaagaacaaaactctgtctcaaaaaaaaaaaagaaagaaagaaagaaaactatagcgttagattaacctttgagttaatctgagtggccacgtggtcatctatggtatgcagccacccacaatacccctcctcagcataaagcagccagaaagatcacgtccagattccccatgattgaggaattgataaatagaaacagggaactgaaaccagctccagtgtcccatagaactgatatttatggtttcttttgaatcaacacattatagacattgagcctccccttcctaaaactcgagacacttttatttgtcttatctgatttcctttctcaggaaaccaagcatcaggcctcccagatagtataaagaaactgaaacttactggattaccacatctggaaaaacgagatgctataccccttacccatgatgattgcctaactgaccatctgctgcctgttgacccattcctcttccttaccccttcctaattcctgttttctcaaacatagttacacttcttccctgatgtataaacccctagttttagtcagttgaggaaagagatttgagattgatctcccattttcctcagctgcagcaccgaataaagccttcatccctgacaatactcattgtcttgctgactggccttctgtgcagcaagcagcaggatctagatgcaaggacctggcctttctggtaatattgtcatcaaccatttaatgatgtagacttggtccccggctcatgctctgtgtattttcttctccatctacatgcattgccttgatggtctcactcaatatcatgacttgaaataacagtgtaaggtaactcctaaattcatatattcatgctcaaaccttcttccaacattcagtcgtaagtcgaattgcctgtgacagagatactttgtggttctgtagacatttcaaactaaccatcctgagcctccgaacctcctccacttgcagcctccccacctcagaagtgggcaaatccactttttgtgtggtctgggccaaatacatgactccctgcatcacgtagaggctgtgctggtccaaagaaggctcaaaagagggcagtttgcgcacacaacgtgtcggggcagggcttccagatgatcattcggcttttttgtgtcttccaagatgatgatccggggaggagggatgtgaaagggggtcagtcgccaggcgagctgaggacccagttctgcgcctttgcctgtgccctgacctgaaggaaagtccctgtctcccgagctccgattttcccgagagaagaatgcaatgtaacccttgcccctcggttccctccctccatccttcccctcgagttgtgcccaccgtaaagaggtgggtctggagcgtctcctcgggtcctggagtgcctttccctgggaggaaaacttgcgccgtgaagcgttcctcccgttgttgaacacatgaggaaaactacactacttagaaggctgtgcattatgcgtacggcgggagctgggccaacgacggcctaggacggggacgtttccgacggctcacgccggtgggggcgggacttccgggttgctcgctgcggacgccattttcttctgcacttctgtctggagaggtctgtagccactgagggccccggtcggggccgctttgcaggtccctagtcaggaccgagcaggggagtaggataggaatccccgccgcacctttgtacgagcctgaccccttccgtgggtttgttcctgggtcgccgtcaagctgcggtctctcctcccccgcccttcagccccgcggtctccaggggcggcgccctgggtctggaacgcggttgccaccgaggaggcggcggccctgcgtctggaacgccgttgccaccgaggaggcggcggccccgagcgcgcctggaagccccgggcaaccggccagggtcgggcacaggtggggtccgtcaggccgcccggggctcctctgtcccagctctgcggcccagggggtgacgtgatggcggcagcggtgctgacggaccgggcccaggtgagtggacggtggcttcgcggttgccgcttccttgccagcgctgaggcggtttccgaagtgggtgggagcccaggtatcccctggatttgtcttcgcagtcgtcgttcgctttggtgtgtggagctggtttgccacttaatttatacctggccgtaaggagtgttgggcctactggaaggagctccgtaggttgttgagtgaatgatgcttcctctggggactcccatcatccttggcctgcaagcattctctggtggaccaggtctcattccagcatgaattgggggcctgaggggggaaggggagggcagggcagtagcaagccgacaaatgcgcgagcagagacaaggtatgttgtatgtttaaggaggctcaggagggtgtgtaaggttgccatggttttcctgcggccgctgagacgtggagggcaacagtgtgtggtcttttcctggatgttctagccatccgcaactactgcagacattgtggccagtcagatgcccttactctcatcgctacagcctgcattatccttggccgctcgtgttccgtggccccaaagtatcctggcgtcagagacaagttctgtcggaacccagtaaggaaagaggccgatggttggttcattgtggaatttccttgggggatctgggagacccagggagatcccagagggcatgggaagctggtctggagcctgtcgttccccaagtagatgcagcccttccagtgccgctctgtggggtcagtgaggaatgctgagctttttgtgcccgtgttcacatacttttttttgttttgagacagggtctcactctgtcgcccaggctggagtacagtggtgcactctcagctcactgcagtctctgcctcccaggttcaagcaattctcctgccccagcctgccgagtagttgggattacaggcatgcactaccacacctgactgatttttgtattttagtagagactgggtttcaccatatttgccaggctggtcttcaactcctggcctcaagcgatccgcccacctcgacctcccaaagtgctgggattacatgcatgagccaccatgcccggcccacagatacgtttttcagggctaattgaaatagacttaatgttagaaatgagtggaaatgcttataacttcatcgcattagatttgctttgatgttgggggagtgttggagttacactgttagaccgtgaatcatagtaaccccatgtttagatcctatctatggtggtgagatgtgtgactgggtgaattgatagcgcttccttagcatgaagtcattgactgtgaaggtgatgatggtgttgactgcagggactgtgaaaggattaataaaaatcccagagcacactgagcattgaatactttaaatttaacaactgttactggtgggaagtgttattgtattgatccagaaatcaaggctcagagaaatgaaatgctgtctttgaggtaagagctgtcaagtgtcagtttcaagtgtttggagctaggaacttctagtcactgtgtttacacaggatgtgaagccttcaacatggggcaggcacctagctggaccagtgagactcaggtactgccgttgtaaccattattgctattattaccatttccccatttccctgtcgttttagagcccttagcttctgtatttcacagtccacaagttgtttccgttgtcctgtgtcattctctaacggccgttaaataggaggcttctctcctttactctggtattatgttaaaagcatctatcttccctcttgagcccagcacagagctaggccctcaggaggtgctctgtgattcaggccgccatcactgtacaccttttccagtggagcacagtctgtgatctcattcagcagctgaaaggccaatactactaattctgtttgactttccaggtgtctgtgacctttgatgatgtggctgtgactttcaccaaggaggagtgggggcagctggacctagctcagcggaccctgtaccaggaggtgatgctggaaaactgtgggctcctggtgtctctgggtaaggccttccttccccctccaccatgcaggtgacctgccacttccttcattccatcttctgactccaggcctggctgcacaagaaggcctctagaatctaccttgcctctttcccacagctttagtcattttccacagtaacctcttcctatctggtctcctatatctctgggctaaagacagggtactctttggctcccagccaaaggagaaggtggtaaaaggaaatggggtgttttgcaaactcaaaggtaattttcagctgtgcctcatgaggggctggtgtaggaactgagaaccaccacgatggtgtcctggcttctctgtctgggtctgctcatgtcacgtctattctctatggctttttctgccttagtgagttcaagacaagagtggccacctggattagggttctctaaagggacagaactaatagaatagatatatataaaaaggacagtttattaagtagtaataactcatgattacaaggtcccacagtaggctgtctgcaagctgaggagcaaggaagccagtccaagtcccaaagctgaagaacttggtgtccaatgttcgagggcaggaagcatccagcatgggagaaagatgtaggctggtagtctaggccagtctagtcttttcatgtatttctgcctactttatatgctggcctcgctggcagctgattagatggtgcccacccagattaaggggggggtctgcctttcccagcccactgactcaaatgttgatctcttttggcagcacctttacagacacacccaggatcaatacgttgcatccttcaatccaatcaagttgacacattaataaaaatcccagagcacactgagcattgaatactttctctttaaatttaacgactgttactggtgggaagtattattgtattgatccagaaataaaggctcagagaaatgaaatgatgtttttgaggtaacagctgtcaagtgtccgtttcaagtgtttggagctagggacttctggtgactgtgttaacacaggatgggaagccttcaacatgggccaggcacctagctggacctagctgttaaccatcacaactccatcccttgtcaacttgaacccatacacatctcctgagatcatacataatcttcaaataaagacaataaggtcataattatgcttaacataatacaagtatcgttcatgcaaccgaaacacactaatccccaacccaagtgctattacataaaggtagcaatacttaaatgctgatatgaagtcagtaaatcttacgtcacatgataaaggaaataaaatgcagatgttttcttagtacaagtgtatacatcacaaacatgtttttaataaaagaaggaggaaatacaacaattacagtcctcatttctgcaactggtcacttggtcgtagttggtattaatgactaccttcttctcctgcacattctgtattcactttgccttcagcaagcacctcagcaggtcatggttttttttcctggtggagtgacccaaaccttcattcctgaagggtctgggccatttgtagtcctgcctggattgggctgttgtagcttcccattgaccttaatcacagggcatggtaatactaagagatgccctaatggatcttctgtattccatgcatactcttccttacctccattgtggagtagtagactgatttcatcttgatagtctgggtcattcatcccagccaacactgtaactcccttcttaggctattgacttaaaggtaggaggagcccaaagtgtccaggtggcaatcttaacttccagtttaatggaatcgttgtgtctcctggtggcagcattcctccctctgaaactaagacttctaggccaacggaatgtaatgtcgcgggaataggaagcaaaattttgctagttgatcactagggatgatgttgagtggtgccatttgcacttccaccccttgattcctggacccatgaatcctggctatgggagaaacagtaccatatattggatgctaattcagagcatacatggcctactggagaactttgccccagccctgcaaagtattgtcactagttggagtaattatgactacaaaaggtcattccaccattctgtcaatccagttgcttcaggactatggggaacatggtaagatcagtgaattctgtgagcatgagcccactgctacacttctttagccataaagtgagtgccttggtcagaggcaatgctgtgtggaataccattacgatggataaagcattccatgagtccgtgaatggtagtcttggcagaagcactgcgtgcaggataagcaaacccatatccagagtaagtgtctattctagtgaggacagacctctgccctttccatgatggaagaggtccaatataatcaacctgccgccaggtagctggctgatcaccccgagggatggttccatattgagggctcagtgttggtctctgctgctggcagattgggcactcagcagtggctgtagccaggtcagccttggtaagtggaagtccatgttgctgagcccatgcgcaacctccatccctgccactatgaccattttgttcatgggcccattgcacgatgacaggggtggctggggaaagaggctgagtggtgtccacagaacaggtcatcctatacacttgattattaaaacctttctctgctgaggtcttccattggtgagcactcacatgggatacagatatcttcacagtttttgaccactcaggtccatccacatccctcttccccagatttctttgtcaccaactttccagtcatccttcttcgaagtccctgaccatccagccaaaccattggctacagcccatgaatcagtatataattacacatcttctcatttctccttccatggaaagtgcacagcgaggtgcactgctccaagttctgcccactgggaaatttcccttcgccactctccttcagggatgtcctagaaaggggctgtagtgctgcagctatccactttcaggtggttcctgcatatcatacagaaccatctgtgaaccaggccctagtcttctcttcctccgtcaaccgatcatagggaacttcccatgaggccatcggtgcaggctgggggagagaaggtggggtggcaggagtggagtctgtgggcatttgagccacttcctcatgtaacttgtgccttcaggatccgcttgagcccaatcacatatataccactttcatctgatgatggaatgctgctgtgcgtgacccacttgatggctagctgggtcagaaagcacccagttcatggtaggcagttcaggttgcatggtgatttgatgacccatagtgtaacaggccaagagctgtctctcaaaaggagagtagttatctgcagaagatggcagggccttgctccaaaatcctagaggccttcgctgtgattcacctatgggggcctgccaaaggctccaaacagcatccctatctgccactgacacctcaagcaccattggatctgctgggtcttaggggccaagtggcagagcagcttgcacagcagcctagacctgcctgttgcagagccttctcctgttctggatcccactcaaaactggcagccatttgggtcactcgataaatgggctggagtggcatacccaaatgaggaatgtgttgcctccaaaaaccaaataggcccactaggcattgtgcctctttcttgattgtaggagggaccaaatgcagcaacttactcttcaccttagaaggcatatcttgacaggccacacaccactggacccctagaaattttactgaggtagaaggtccctaaattttagtcagatttatttcccatcctctggcacacagatgtcttaccagtaagtccagtgtgtttgctacttcttgctactggatccagtcggcataatgtcataaatgtaatggaccaatgtgatatcttgtggaagcaaaaagcgatcaaggtctctctgaataagattacgacacaaagtcggagagttgataggcccctagggtaggaccgtgaaggtatattgctggccttgccagctgaaggcaaattgcttctggtgggccttatggacaggaatggagaaaaaggcatttgccaagtcagcggctgcataccaggtaccaggagatgtgttaatttgctcaagcaatgaaaccacatctggtatagcagctgcaattggagcaaccacctggttaagctttctataattcacagtcattctctaagatccgtctgtcttctgctcaggccagatgggagagttgaatggggatgtggtgggaatcaccacccctgcatcattcaagtccttgatggtggcactaatctccacagtccctccagggatgtgatactgtttttgatttactatttttctaggtagaggtggctctaatggcttccatttggcctttcccaccttaatagccttcaccctaacagggagccagtgtgggggttctgccagctgctaagtatgtctgtgcctattacgcattctggcactgggaaaatgaccacaggttgagtctggggacccactggacccactgtaagtcaggcctgagctaaaactcctgacctccataagcccctactttaactggaggaccacaatgatgttttgggtcccctggaatcagcgtcagctcggagccagtgtcctgtagtccccgaaatgtctgatcatttccctttccccagtgcacagttaccctggtaaaaagccagaggtctccttagggaaggatgagagaaagattaacagcataaattgtcagtagtgtagtggggtccttcctcaagggacctggcctccccttcattcaaggggttctgggtctgtaaactagcccaagtctggaaattgaagggccatgattctgtttttgtaattcaaattagtcttttgtccattcgacctggaagttttctgcttatataaattaaataggattgcagtaggcttcctatcagtttcatttctgggaacactgtgattaattagccaacgccagagatctacatgagtcagactattctgattgctgctttgtctctgttgtccattatgatagctatgcctaccttgcctttgatggttgagtgccaccacttggcccctgccacctcgggatccaattattcccaatgtattaaatttttgtaggtgagtgactgaaattccaactgctggatctggcaattacagggctcttcaaagatgcaggtgctgccctcgcaaatctattttgcaagccattggttaaggttatgtcttatggaccctcccagctgggatgagtaggtctaaagtgactaatctactccatcatcccaatctccctaagcctttggatcccttcctctacattagaccaagggagatcaagcattcccagctcacccatgatgggccatcttttaatccatatttcagctagccaagcaaataagctattggaaccttttttaactcctcaggctgcaacattaaatgcaggatccctaattagtgagcccaaatcaataaattcagcctgatgcatctgtatgttccttccagcattatcccacacccttaatatccattcccgtgcctgttctccaaatttctgcttatataaattagaaaactcaattcaagtgtagctcacctccccatgggtcacactctgaacctcacttctgtgggcccatcgggactttagttataggtctagaagcaaacaaaggtgttgagggtgctagaggagaatcgatattatcttgcctggcaactgcctcaggggaggccatcactgttgcctcaggcagcacagggtttatctcctcagacaaaggtggaaaggctgatggcagcatgggtcggggagaggatgttgccactattggggatgccattttcctttctctttcttctgcctattaaacctccactcctaaaaaaaaaaaaagaaaaaatgatgaactcagggattctaactcctggcttcagaagcagatactaagcctcaaatctgctaagattgccctgagtgagtcttatctcctgtagagaaaaagctgaaattgtagaaaaacagacataagctagtcatgtgagtggctgacctgcaacaaaaggtgcatgcacagcctcaccaggtgtctactgttaaagtgagggcactgattggaaaagaatgggaccctgaaacttggaatagggatgtgtgggagaaccctgatgaagctggggacactgagcttgtaaactctgatgaaccttttttgccatcccccaaatgccatcccagcgctttgggaggccaagatgggaggatcacttgagcctagaagtttgagacaaagcctgggcaacatagtgagaccctgtctctaaaataaattgaaaaaaaaaaaagccactcagtaccctgttttactcccccaccccaccccgacctttgggtcttgtctttttctttgtctttgtctcttgtctcttgtgtcttgtgtcttgtcttgtcttgtcttgtcttgtcttgtcttgtcttttctcttttccttttctttcgttttcttttcttttctttttctgtcttgctgtcttgcccaggttggaatacagtggcacaatctcggctcactgcctttgcctcctaggttcaagcaattctcatgcctcagccacttaagtagctgggactacaggtgtgtgccaccacacccagttcgtttttgtatttttattaaagacgggattttgccatgttggccaggctcgcctcgaactcctgagctgaagtgatccatccgcctcagcctcccaaagtgctgggattacaggcgtgagccaccacacccaccctttactttttataataaaattttttttatacatttgttatatatgtgctatatataattaccatatatgatttgttataaacattagtatataaatgctggatttctaattggatcaaattatggacattgttttaatttacttattgtatgtgtatatatatacaacttatttatgtgaagatatttatatatatagtttttaagactaaataagggtggtattgtgtttgctaggcctggcatttgtatggtacataaggtttaaaagttcactttcttttttctgccccttgggtttgtagctgcctttttctttttttcgttatttctctctttgtgttttaggcttttggcatccagaagtagtggatcttagtttctgtccctgggtagtaaaaagaagctggggagaggaagaggtttgatgcctccaggcagctgcctctccctggtacagcctctgtcccaagtgtaatcagtcccccgctaaatgactagtctcttacaggatgggaagagagaataaataactcagttaagcagcccaccagtgactttggtgttggcttggttgattggacttgtatcccaacacaatccatcagaggaagtctctactcactaccttttgtgaggagcctcagccttgtatattaccccgtaaaccaacccagaaactaggtgtgtttatgttggaaaagtagactaaggagatcagtctgtcccagaacggtgccagctggggaattactgcccttgcgtatctagactgtggcatctttaaacactggaaggatctgaggagcactcctttaggattcctacagcactttaggccagaaacccatggcagcaaatgccagacgcagctgaagcacaaggctgccagcatctcgcagccttccccgggcagaactttctgtgtggtacaatcccttagtgagctgatcttcagccttcccatgagcgcagagtcagcctgctgggtgcaccagttgtattaatttgtatctatgggccaagtgtggtagctcatgcctgtagtcccagcagtatgggaggcaagagggttgcttgagcccaggagtttgagaccagcctgagcaataaagtgagacccagcctctacaaaaaaaatcaaaaaaattatctgggcgtggtggcacatgcctgtagtcccagctactcctaaggctgagatagggaagattgcctgagcctgggaggtagaggctgcagtgagccatgatcacaccactgcactccagcctgggcgacagagtgagaccctgtctcaaaaaaaagcaaatttgtacccatgggattttaatttatagcagtgacttagtgatgacacagagaggttaataacattgaaagaagaattcattatttacaattcgtgaaagaagagggcatatgctgggcctcatggggatacagctggaagcacaggggaggagaaagcctttaactgggtgtggtattctgatacatactggtttttgtccaccgttcctgattcataacccctatagcccttttgttaaaatgctgggtatgttaggcctcagggtcaggcctctgacctcctgccctcctttcgctctaacgttcctccacctttctgactgtgggtctcatgagtgggtccaaccctataccctgggaaaggaatgttgatgttttgaagcttccataaagactccaagaggtcacagttgagtgagcttccaggtggtccccccaggaagggcatggaagctctgtgccccttccgccacaccttgccctaggagtctcttcatctgtatcctttgcaatattctttataatacactggtaaacatgagtgtttccttgagttccgtgagctgctccagcaaattagttgaacccaaagagggggtcgcgggaaccccaactcaaagcccattagtcagacattttggaggcctggacttgtgactggagtgcagggtggggcagtcttgtggactcagccctcaacctgtgggatccgaagctatccctgcgtggatagtatgggaacagaattagaggacaccccccactggtgtctgctgcttggagtttggggaaaaccccccacacatttggtcatagaagtcttgttctgtattgtcatggtgtgagagtagagaaaaaacatgattagagagagttttccctgcgtattgggtttcttctggaaaagcaagacagggcatggtaaacagtttagagctggctagtttgagtaatttcagtgaggtttggggcatagggactatctctagttgtctggcacttggccctgggttgatttagggcaggggaaatactggcttggtatgtgagagtttgttaaagaagtggttgggggtatggtttggggttaggtggattgcacatgaaaggcatgtgcttgttcccaggggagtttattatcctagaaattacctgtccctgagaggagcagtctctcccaaagtctgaaaaggcttcaagatgttctgagcaacgtcaagaaaatatgactactgtattttcatctgacatgaacctaaacttactcggtttagaagataaaccttcatctatgaagctgtcctttgagggttttttgttgttcttgttgttgttttttgttttttaaagtagaagtcctctttttatgaaatgttggtgagagtagatactatttgatgtttctgtaaatgtccttatttaactctatcacagtagaacgttcagttttttaaatttttaatggttcatgaaatgcagaggtctggaatcactgaacctgcccctccccctggctgctggtccctgaggatgacctccagctcacatctctgcatcgtcatcactacccaccacccactctgtggtgctagtaatttcctccttagtgtggtgtttggaaggggagcccgaaccctggtgtccagccccagctctgctctttaaaaactgtgtggccatggccaggcgcggttgcttacgcctgtaatcccagcactttgggaggccgaggtgagcagatcatgaggtcaggagatcgagaccatcctggctaacacagtgaaaccctgtctctactgaaaatccaaaaaaattagccaggtgtggtggcaggcgcctgtagtcccagctcctcgggaggctgaggcaggagaatggtgtgaacccgggctgaggcaggagaatggcgtgaacccgggaggcggagcttgcagtgagccgagttcacacgccactgcactccagcctgggcgacagagcgagactccgtctcaaaaaaaaaaaaaaaaaactgtgtggccttggtcaaatgactgaccttgtctgttcctcagtgttctcattggtgagatgaggatttaccacatctgcatcccagggttgttactggggtaaagggttattgatagggtttggctctgtgtccccacccatatctcaccttgaattgtaataatccccatgtgtcgtgggaggtaattgaatcatggggacgggtttttcccatggtgttgtcgtgatagcacataagtctcatgagatccgatggttttataaaggggggttcccctacgcatgccctcttgcctgctgccatgtaagatgtgcctttctccgccttgtgtcatgattgtgaggcctccctagccatgtgaaactgagtcccttaaacctctttctctttataaattacccagtctcggatatgtctttattagcagcgtgagaacagactaataaagttattacgtgaaaagggctcaaaacagcacctgggagaccacgctgtgtgcagggagccattgcaatcctgttgccatcagtactgttattgtcatcctcatcaagatcactgtcgttggcatacctggacccgggactttctgggtagcgttgtggagctttgtggttaaacagcaccgacagcagagatggcaggacctgggccttactgactcagccattcaccagttctgtgctcttcagcaaatcactttacttcctgatcctgggtttctttgtcaataaaatggtgttgatcacgatgtggacttcctggggatgctgtgagaaaatcctcagctggaatcctcattttttctttagtctagaggaagagcattataaaacattgcttaggatgtaaaaaaaataagacttagatcaatgaaatcacataccttgtttggaatgaaaagagtcaatatttaatatttaaatacatcagtttttctctaagatactctatcagtattcacttttggaattacataatgcatttatgtaattatggaaaccttggtttccaggtcacatgccagcttttcattcccatgcacaggagcagcttcactccaaggtctggtctccatcctgaagtcccaaactagattgaaggtctttatttcttttcacccacatccatgtgtccacttgctttctccataaacagggtgtcctgttcccaaagctgagctgatctgccacctagagcatgggcaggagccatggaccaggaaggaagacctctcccaagacacctgtccaggtaggagccaagatctgggcaggttggagtcccttctggcttaagactggatggagaccactggccctggaatctcttgggaagcttctcattgtggcctctctctatataactcttatataactctatcacactagaatgttccatttgagagccatggagccctttgacctgtgttttctctgtcctcctagccccatcacagtgtcaccatgcctgggaagaagtgagatttaagaactaagatgtgttcaggggttccaactgtgtgggcctgaaatgtggcttgccagtcacctgctgtgtggccctgatgaagttgcaggatctcctgtctttgtatataacttcagctaagttaacagtagctgctgtatcagacagattctaaaatctcagtggttcacatatgaaaactctttcccactcataccagggactgtgtgggtcagcgaggagctctgtacgacacagttattcaggacccaggttccttctgtcatcagcctgttgcattaagattatcctaacgtcctcgagctggcagagaattgagggaataagggaagttaaacccacttccagaaataccaactcccctcacattccacccacaggaactaggcatttggcttgggtccatgggactgggaaatgtggctgagctgcttgtccaaggagaagagcagaaggtttggtgagcacctactctcagtccactacattgagtctgttcctgaaaagtgttattagaaatctttttttttttgagacggagtctcgctctgtcacccaggctggagtgcagtggcacagtctcggctcactgcaagctccgcctcccgggttcacgccattctcctgcctcagcctcccgagtagctgggactacaggcgcccgccaccacgcccagctaatttttttttttttgtatttttagtagagacggggtttcaccgtggtctcgatctcctgacctcgtgatccacccgcctcggcctcccaaagtgctgggattacaagcgtgagtcaccgcgcctggcctagaaatcatttttatgtcattgggcagtttaaagatgttatgtgatacattaatgcataaaactggatagtttctgagccatagtaagtgactcatccgaatgtcattattaaccttaaagagtgatgctatgttacatttccttctgaactctagggaatagggcctttcttactctcccaatttctctttccacttatattctgcctatcagcctctcccaccttctccttccacccattccctgagtgtcaatcagacactaagaagcagtagtttgcccatgtcttcctatatctcctgttttccaaaaacctcagggtgacatttgaccttctgtgtcccacactcaggctgctgagggcactgaggccatctgtcatgtgtgtggattggtgccactgcagagccttggcctctgcccgcgtgggttccttgagctgctcatccaaccctgagtgtctgtgcagtccctgttcagcccttcagagtctgttccagattgtcccctcctcagtgccacatctgcacttgaaaatctcaaaagcacaaaactcaacatgcctaacaaggaacccatgatcttgctcactcctgccacctcccaagtttctgtgaatggttctgccatccaggcagattaggggactggccccaacctcagacaagtcaacccctccacctccatgagtccctgcatccagccaagtagacagtttttgtctccaggcacagatgtctcagcatgtgagtgctgatgtgttagcaggctttcaggttgaaaagaaagtctcctgtcttgtattgcttgatcagcagcccttacatgttcatctcaacttctcttttccttactggaagaggtcttgccccagtcatggccaattcctataccagggtctagaacacacttcctttcatggacatcctttcttcatttatattctgcttgttttgtgattctctactcaacctaaaaatatgcttgtttcttcttttttcttttctttttttttttttttttttttagagtctctctgtgtagcccaggctggagtgcagtggtgctatcttggctcactgcagtctctgtgcctcagcctcccaagtagctgggattacaggtgcatgccattacacccggctaatttttgtgggtttttttgtttgctcgcttgtttgttttttgttttgttttgttttttgagatggagttttgctgttgttgcccaggcgggagtacaatggcgcaatctcggcttactgcaacctccgcctcccaggttcaagcgattctcctgcctcagcctcccgaatagctgggattataggtgcatgccaccacgcccggctttttttgtatttttaataaaaatggggtttcaccatgttggccaggctggtctcgaactcctgacctcaggtgatccacccgccttggccttccaaagtgctgggattacaggtgtgagccactgcgcctggccatatttttagtagagacagggtttcactgttgttgcccaggctggtctgaaacccctggcctcaagcagtccatctgcttcggcctcccaaagtgcagggattacaggcgtaagccactatgcccagcctcgagtttcttacaattgaagaaaataaaacaaatgcttgtggctcatgatatatttatatattcattgatacattcatttactatgtgggcatttaattgtctagatttggctggcacagtggctcacaccataatcccagcactttgggatgctgaggtgggaggattacttgagctcaggagtttgagaccggcctgggaaacatggtgagaccccgtctctgcaaaattaaaaaaattagctgggcatggtggctcatgcctgtggtcccagctattcaggaggctgaggtgggaggatctcttgagcccaggaggtcgaggctgaagtgatcttattcatgccactgcactccagcctgggtgacagtgagctcctgtgtcaaaaaaataaataaataaaaataattcatgagagaccatgaaccagaggcaaaaaaaaattaataataattttctatgtttcattcacagaaacagtgatactgtggatattcatatatgtatttcattttccacttgtggaggtgcattttttgatcattcttggagtgaaattattggtttgtaggctatgcaaatgctcaagtttgcaagatcattccctttgttttctaaagagcttatgccaatttgcacttaaccaggaaagagaggttccgttgacccatatcctttccattataaggcttatcaatgtttgctcatcaaatggacacagaatagtctcgtgttcttgatttccctttctttcactgctgtaatgttttagcaacttactatgatttttggttgatttatattttcttctgtgaaaatagaaatcattttttattttatgatgaatgcctatttccattaacctgttttcctttcactgcttggtaggggttcttagtacattcttatccttaccttttatcacttatatatgctgaaaaatattttctagtttttaattttgttctcttactctctttaaagtatctttctccaaaaggtcttaatttactgtagtctaacttatgacttttcttatataattaatgatttttttgtcttgtataaaaaatgttggtttacctcaatattaaaaatatattttattctaaaagttttaaaacttggcatttgacattttttcagtgaggttgatttggaatatatagtgtgatagcaatgcagttattttcgttctccatgtggctacccaatttttctagcttcgtttccttaatttaacagaccatcaagttccatagttaagtatagttggtattttacagggaattatattgaatttatataatttgggtcgaattgtcagttcgtattattaaattcttcattgatctagatcatctttattgtcttcaaataagattttataattttcttcatcttgatcatgtgtatttggggttttttgtttgttttaagagaaaaggtcttgctctgttgcccaagctgggtgcagtggcacagtcatactttgctgcagtcttgaattttgcggctgaagcaatcctcccatgtcagcctcccgagtagttgggactacacaggcttgcaccaccatgcctggctaatgtgtttttagttttgtttttaaaaaattttttttagagatgggagcttgccgtgtttctcagagtggtctaaaacttctgggctcgagtaatctgctcacctcggcctcccaaagcactaggattacaggctttggggggctgaggtgaaaagatgagcaccatacacagcagcctggccattggtcatgtgtatggtgctaatcttttcaccaggctgttcctcaggcatacaagactcattgtgtcaagccaggtcctcttacctctttccttatgagccttcaattgatataacatcagtcatatcaccttcactgtcacccagctcggaatcatgggaatcagcctcccctctgtccctggattgtcatcaacaccatcctgcagtttctttgtactttctgtctctttagactacagtgtccagtgtccttcctgctttctctttatggcaactcttcttcacaagcataggactcacttcattgagcacctcttactggaaaactgatttcttcctacccaggattagccaagctcaaggttaaggacacagtcctctaagactaccaggtctaactcttccgacacggactacaggtttgggtcccaaagccgttgtcaggttcactaattagctttagactcacaaaattctctaaaacctgttttagttacagtcatgtttattacagacaaagggaacaaattagaagtgacacagaatgttgggttggaaaggttcccaacacaaagcctcagtgttttcaggaactcgctgtgccccagtctggcatatggcaatatgagcttagaatgttgccaacccaggaaactcaccagctcttcattgtccagaattgtactgaagcttcattacataaccacagttgattgtctcatcacctgtgtggctcggtctccagcgtgccatcctttccagagattcagcatttaaattatgacataagccctaaccttctaatcacgtggtttagctttctggagtggccagaccttaacctgagtcatctcttcaggataaactgtggaggactccatagtgagttccccgtttgcataaactgtcagatagggccattgggtcccaccataagtaaaaacattttggaactactcagtgtttacaggttactttccatgacttcacaggaaaagcgtacttctctttggggattaatttttgttactcacttcctgtcttccatgtgggctcattaggtgctccttcctcgtgttcttgtagcaacacagcatgtccttgcttagttgcttacaggaagcttaccatgcacggtgtcgtcgttactctgtctacccaggtccaatctgtaattgtgaaggtggctccacgaacagacgcattgtctcctgacccagcctctgcccctaggtctcccatgcagaatatcccgagtccaaggaccaggatagaaagaaattgcaaacccaagaatttgagatacagaaaatagcaacacagaggcaatatttttatctatggtttttcacagaaatggtaatattcttttttccatgttgtcctttactaacaggcccttttgtgtgctggatttctttcaggcgacaaaggaaaacctaagaccacagaacctaccacttgtgagccagccttgtcagagggaatctcacttcagggacaagtgacacaaggaaactcagtggactcacagttggggcaagccgaggatcaggatgggctatcagaaatgcaggaaggacacttcagaccaggaatagatccccaggagaagtctcctgggaagatgagccctgaatgtgatggtttagggacagctgatggtgtgtgttcaaggattggacaggagcaagtctctccaggagatagagtccgtagccataactcatgtgagtcaggtaaagatcccatgattcaggaagaggaaaataactttaaatgcagtgaatgtggaaaagtatttaacaagaaacacctccttgctggacatgagaaaattcactctggagttaagccctatgaatgcacagaatgtgggaaaacctttattaagagcacacatctcctgcaacatcacatgatccacactggggagaggccctatgagtgcatggagtgtggaaaggccttcaaccgcaagtcataccttacccagcaccagcggattcacagtggagagaagccttacaagtgcaatgaatgcggaaaggccttcacccaccgctccaattttgtcttgcataacaggagacacactggagaaaaatcctttgtgtgcacagaatgtggccaagtctttcgacataggccaggctttctccggcactatgttgtccacagtggtgagaatccctatgagtgcttggagtgtggcaaggtcttcaaacacaggtcatatctcatgtggcaccagcagactcataccggggagaagccctatgagtgcagtgaatgtgggaaggtcttcttggagagtgcagccctgattcaccactatgtcatccacactggagagaagccctttgagtgcctcgagtgtgggaaggctttcaaccaccgatcctacctcaagaggcaccagcggattcacactggggagaagcccttcgtgtgcagtgaatgtggaaaggccttcacccactgctctacttttatcttgcataaaagggcccacactggagaaaagcctttcgagtgcaaagagtgtgggaaagcctttagcaatcggaaggacctcattcgccacttcagcatccacactggagagaagccctatgagtgcgtggagtgtggaaaggccttcacccgcatgtcgggcctcacgaggcacaagcggattcatagtggagagaagccctatgaatgtgttgagtgtgggaaatcgttttgctggagcacaaacctcattcgacatgccattatccacactggagagaagccctataaatgtagtgaatgtggaaaggccttcagtcgcagctcgtccctcactcagcatcaaaggatgcatactgggaaaaatcccatcagtgtaacagatgtgggaagaccttttacaagtggacaaacctcagttacccttcgagaacttcttttagggaaggactttttgaatgtaaccactgaggcaaatattttgccagaggaaacatcttcctctgcatctgatcaaccataccaaagagaaaccccacaagtgtcttcactgtgagaaaaccttctgttgctgaatattacttgtcatctgaagagtcatattagaaattcgttcagtctagagccttattctccatctgataatttatcctggagagagacccagtggttattgtgcacataggagaaccttcagctgcatctttctccttagtttacagtgcaattttatctcaggaattatttttaaaaggaggaggggacatagaaaaaatgaaatgcaagcacacatcttttcaggcttctctgccaagcctatggcgctttgtcatggatttcttagtgtatttgggggaagggaaatgtttcaaggtaaagaaccttgaccctttatgtgcttgtatgtacatttattgctatccagtgtcagaacagttagtttaggaaaagtatgcaaactttaatcgcacatcttctgtattccacaatagtacttactcttgagaagcataactttatgacaacttagggggcttgagccatgaaatactcacgtttaagtcagtaaggatacacatgttaacattcaggcttttgtcttgatgcccgtcttttggtttacgtcatcattgtagccatatggtaaatttttatttgttaaatttttaaaaattacttagctcaaaatgtcagtggtaaatttttaaattgagtaaagtgattcttctttgctcttatttaaaatcgacagcatttctagttcctttgacattccatataatttttaggattagtttgtacttatttacaaaacagtcttgttcagatttttacagaaattgagttaagtctgtggattaatctgttaagaattggtatctttactatgttgggtcttgtagttcatgagtgcaggagtaggcctcttaatttataatagttaagcattccttaaagtatttcattaatgttaaaaattttcagcgtatagatccctatgcatttttgttagaatttgcatcctagggtgcttttttgtttgtgtgtgtgtgtaatttgagtgattgtaaatggcattgatgtttgaactttgaattgcacacaatttttggtagtatacagaaatataatatttttggacattgttttgctaccctgcaaccttattgagttcacttattatttttagctatttctttcgacagaatccttggaattttctatatagaaatgtcatctgcaaatacagaccattttttatctttcatcttacctgtaatataccttttatttcctttttgtttgtcttattgcattgcacaagctgggacttccattatagcgttgaataggaatagtgagaaaggccatccttacctggttcctgatagtaggggggacaatgttcagttttttgtttttttgttttttgtttgagacagggtctcgctctgtcacccaggctggagtgcagtggcacgatcttgtctcaccatagccttaagttcctgggctcaagtgatccccccacctcagccctcaccaccccccagtagctggtactacaagcatgcaccaccagtcccagctaatttttgtattttttggtagagacagggtttcaccatggtgcccaggctggtcttgaactcctgggctcaagcaacctgcttgcctgggtctcccaaagtgctgggattacaggcgtgagccacagtgcacagcatgttcagtttttcatcatgaagtataatgtaagttttataaaacatatgtcctctataagggtaaaaaatttcctctgttcccagttttctgagactctgtgttgctatgaataagtgtggaattttgttcagtactttttctccaccagttgatgtcattatgctattttccttctacatcctattgatggaatgtattgctttgatcaagttttgaatattgagccagccttgcatccttagaataaaccatacttgtttgtagagtataattgtttttatatatcatttgacatcattccctttgtttgtattttgttgaggaaatattcctctaatttattggctaataatgtgtagttcttttttcttttgtttcttatgttctaaatgtcttatgtgtggttttgatgtctaggtgatcttgacctttcaacatgaattggaaggagttctcttctaatttttggaagactgtgtagaattggtgttatttgttcttgtcatgtttgatgacctctagtcaaccattgggccagagatttttcttctggaggcttttaaattacatatttattttattggataggtagaactattcgaagtatctatttcttgtgtaataaattttgatagtctgtcctgttgaaggaatatttcatctgtatttgtagcactcccttattcttttgatagcaggatctgcacttctttttatttttaatatttaaaatgtgcatactcattttatgattgagtcttcttagacatttatcagttttattgcgcatcatgctgaaagatgtaatttttgcttcatctctcacttcagagaactagcactttatattaatgatttgtctctattcttgatttctttgatttctgctctgatcggtattatattccacttgctttggttgtatttggctctttctaacttttcaaggtggggttttagattattgatttgagatttttttgcttttttaatgtaagcattacattgtataaatttacctcatatcactattggtttgatcccacaagttttaatgttttcattacattttaattctaatagtttttattttttgagacattctctcttagccatgaattatttaatagtatgcttaattttctggtgtttggcatatttgttactgatttctaatttgttccatgtttgatctgactgtttaaatgtgttaacatttttttatgacccaggatagggtctatcttgtttcgtatagctgcttgaaaagaatgggtgttctgctgttactgggtggagtttctataaatgtctctatgatcctgctcattgttattcaagtcagctatgtccttgctgattttctgtccagcatttctgtcagttgctgagaggggtgttgaagtcctgaacataggccgggtgcagtggctcacgcctgtaatcctagcactttgagaccactaaggcaggtggatcacctgaggccaggagttcgagaccagcctggccaacatggcaaaaccctgtctactaaaaatacaaaaattagccaggcatggtggcgtgtgcctgtaatcccagctgctggggggctgaggcaggaggatcagttgaacgtgggaggcagaggttgcagtgagctgagatctcaccactgcactccagcctgggcaacagagcgagactctgtctcaacaacaacaacaaaaagtcctgaacatgattgtggaagtgtgttgctctttcaagttctatcactttttgtttgcaaagttcaaagctgtattgtttggtacatatacatgtaggtttgccaagtctttgtggtgaattgactcttctgtcattatgtgatgtcatttttttgccttttaatagtcttgtcaatactttacctgatgttctcatagtgactcctgcatattttgattaatgtttgcatggttaatatttcttcattttattttaaagcttacctgtatcattacttatgaagtcagtttctttgaacagcatatactcaggccatgctttttttattcattctgcatatgtctctcttaattggtatgttgaaatgatttacattaaaataattattgatattttagggcttaagtgtgcccttaaatgatttttgtgttcttttttattgttcctctgttatttggggttgtttactagtcttcctataggttacttcaccttttttttttttaataatttgatttgatacatatgtagtgttttttagtatagatcctccttgacttatgatggggttatgtcacaataaacccattgcaagttgaaaatactatgtcaaatatgcatttaatacacctaccctgctgaacatcatagccgatcttgccttcagaatgctcagaaaatttacattagcctgcagttgggcaaaatcatctaacacaaggcctactttataataaagttactgcaaagaattttaaataaaaattcaagtgtggtttctactgaatgcatgtcgcattcgcaccattgtaaagtcaagtagtaagtcgaaccatcctaagtcagggactgtctgtatatatctgcattttttagtgattgttctactattacagtgtaaatatataacttatgacagtttaataagttatcagcaatttagcactttacttccattaggttcctttagcttacctactaatgtaactatcttaagtaatagtaattcctcttcaaaaattgagcgctatgttgcaagatgtaatttttcttttccttttttttgagaccaagtctcactctgtcacccacgctggagtgctgtgatgcgatctcggctctctgcaacctctgcctcccgggttcaagcaattaactgcctcagcttccctagtaatggattacaggcgcccgccaccacgcctggctaatttttgtatttttagtagagacggggtttcaccatcttggccaggttggtcttgaactcttgacctcatgatccacccgcctcggccccccaaagtgctggggttacaggtgtgagccactgcacccggccacaagatgtaatttttactttatctctcacacgtattttacaaaacgtcatgagaaacattgtctcttgaccttttttttttttttttttttttaaagagacagagtctcactctgtcacccaggctggagtgcagtggcacgatcttggctcactgcaacctccgcctcctgggttcaagcgattctcctgcctcagcctcctgagtagctgggattacaggtgtgcgccgccacacccagctaattttgtatttttagtagagacggggtttcaccatgttgctcaggctggtctcaaactcctgaccttgtgatccgccaaccttggcctgtcgacctctttacccattccattgttcattcttctttcttgaaatcccaaaccttctattaacatttcttttcagttatacactgaactttactgtagcctttcttctagagtaacaaatgttctttgttttccttcctctaaagatgtctttatgtttccttcattcccaaagaatatttttgtggaatataagattcagagttggcagttgttttcttttagacttcagagatgtatctctctgttctgtacattattgtttaatataagaaacctactagcattcaaataatcattccctattttacaatgcatcagttctgtcaagcttcattcaaagtgtttttcattgtctctagtgttcagaagtttggctgtgatgtgcgtggcatggaagtttttgggtgtattctatttggcgctccctggtgcttgcccagctttttgatctgtaggattatgccttttgcaaaatttggggaactttcaactattatttcttcaaatattttttcaccccccagtcttgtcttttttagggacttcaataacatgagtggcagatcttgttttacactcccatgggtccttcaggctctcatcttttttctttttccagtctattttctgtcttgttaatattgattaatttttattgaccttccatggtcctcactgattgttttctttgtcatacctaatctgttgagtttgtgcagtgagttttcattttggttttgtattttccagttgtttaatttccattgggtgggttcttttgtacaccttctgtttctttgcttattttttaacgccaaagaaagactctcagagaatagacaactatattccaaagtcatggttctctggtggtttgtcttgacatttgaatagaaatgttaaactatctgggggaatagaaagcccacagtcttctgagttgtgctacaccaatatttctatgaacagatcttacaactgagagtgatctgcagatttttcagagtcatgttctccatggaatgtttgtaaaattccctagctctctgcactgagctgagatcgtgccactgcactccagcctgggcaacagagcgagactccatctcaaaaaaaaaaaaaattctctagctctctatgccttgttgtatcctcaggaaggagtcacctctcttccaggatcactcttgccttttgttattggacacattttcctacctcctgcccagtcttttttaggctctctgtcatacttcctcgcctagtctttaacttgtctctgataaccagatttttcccccataatctgtatctgtattcaagtctctatcctcatccccaaatggatttcaccccgcttgtccatcagtctctgcccatttcttctgtctcccacagacatggtctgtgtagttgttctgcacactacccgtcctcgccccttctcatttccctcactccacggacagctacaggagggcttccatcatttgtcctcttacttccttgttagaactttgtgctgctgaccaccactctgaaccaaaacttctttcttggttcttgaaagttgctgtctttctcctccagagggtctgtgtcttccttccaactcttaaacatttttgtttcccagaatccatcattggccattgctttttcacttgccatgagctctgtgaatgagatggttcctgctgaagacatttactttcaatgatctacagaatttcccaaatctatgtctccagactggatgtttctcacgtctgtggcccactgggcatcttctgcactttctctgcatttgtaaacactgagcctgtatgcgtgtctatgtggccatggccctggccgtggggatgcacccataattataatgagagcaggtgaatgtcatgtggctatgtatgagacattgttgtgaatgttttacatgcatcagctctttcaacatttacagcatctgtgtgtggtaggtaatgttgtttccttcattttgcagagcagaatatagataggctcaggttaagaatttgcccaaggttacacagttatgaagtttggatttaggaatgggaggccacgtagactggcttcagaattcatgtctttaaccactttattgcttctcatgttggggggtttgttttctggtcactatttttactaaagttgattcaacaatgctataatctgttactctcattcgacaatacatcttgactgtttcttcaacttgaggaaggtaaaccaaagccactctttaatgggtgcaaatatctgttgtaactatgtagaagatacagtgtctgggtttgaggacaggggagtgggaaaactgagtagggaagcggtaagacatgcatctggctttaggagtgtttgaagtgcctaaagatcagggtgaatttcccaaatttgaatcttgttgcccaagccacattgcaaccacctctttttctcttacctcgtccccacatccaggcactgccccattctgttcattccacctttttttttagtagaccctccatatatgtgtgtgttttggtgaatggccacacacagcaaagttatttttattgcaattttgttgttgttgtttgagacacagagtctcatactctgccacccagactgaagtgcagtggtgcgatctcagttcactgcaacctccatccccccatgttcaagcaattctcctgcctcagcctcccaagtagctgggattacaggcatgggccaccatgcccggctaatttttgtattttttgtagacacggggtttcaccatgttggccaggctggtctcacactcctgacctcaggtgatccacccgcctcggcctcccgaagtgctggcattacaggcatgagccaccacacccagcctttattgcaatttttggttccctcacagaatgtttaccatgaagctgtgcgtataggtggtaccatgtatgacataccttgacctcaaagataatctacctgggctttttttgtttgtttgttttgagatggagtctcactctgtcacccatgctggtgtgcagtggcgtgatcttggctcacagcagcctctgcctcccgggttcaagcgattctcctgcctcagcctcctgagtagctgggactacaggtgcctgcgaccacacccagctaatttttgtatttttagtagtagtgggatttcaccatgttggccaggatggcctccacctcctgacttcatgatccacccgcctcggcctcccaaagtgctgggattacaggcgtgagccaccgcacctggcctacctgggcttttttggacagatgtacatgattttagaaattgttatgaatgactgtcttgggatcctcaagaacacccccaggtttgacgatttgctgagaagactcaggtctcagcattctgtcatactcaacagctatgatttactgcagcaaaaaaatacaaagcaaatagtaaagggaaaaagccaaaattcagagaaaaccaggcacaatcttctgagtcttgtttcagtgaagtcacaggatgtgccttatttaagttccatctggtacttatgacaacacatgctatatgtccactgggaagcttattagagactcagtgccagggtttttattgggcatgttttctagcacatcccacaattctggacttccagaaggttagcaggggttcagcttttcagctgaaaacgttatccccctttcagctggggggaaaaaaaggcaccgaaaaacagggcagtgagctactcctgttttgggtgggtggagcagtagtaagcctcccaaaatctaaggtcccacactccagcaagggtgaaccttgcaaactcaaaaggatagcagtctccaacctgctgttttatacagtgacttaagtggtactaaaatgctatataagtcaaatttacgtaacattaagcaaataattttttttcagcaaaaaaataatggtcatgactttgtggtgaaggcttatgtaatgattgtaataaattcaggtggctcacgcctgtgataccagcacttttgggaggctgaggcgggtggatcacttgaggtcaggagtttgagaccagcctagccaacatggtgaaatcccatctctacaaaaatgaaaaattagccgggcgtagtggtacatgcatttagtcctagctacttgggaggctgaggcaggaaaatcgcttgaacctgggaggcagaggttgcagtgagccgagatcatgccactgcactccagcctgggtgacagagtgagactgtgtctcaaaaaaaaaaaaaaaaaaaaaatgcctcagttttgttaagaggaaaaagcaaatcctaagttacagtggaacttatgaacaccctagcctagagatttaatttagtgatgaaaaggtacagagagagtctttcaagaaaggacctagtctgctcgcgttctctctctctctctctctatatatatatatgtatatgtgtgtgtacatatggaccacttcaagctacacacacacacacacatatacacgtgtatgaatatatatatatggctataagtggtgcgacttgcaggtactccctttgttcacctttgtaaagatgttattgccagttcagtgtgtatttctatagtatatatgtaaacaatttgtcatccttttgttgctgcttttgaaactagttcatggcttcagtgggggagagatttaaataatatgggtttataatttctgcattattaaatgcagataacttgtgattaaagagtatgttattggaatcatgtttgcctgagttttactttggaggagttgaacagctgactccagccgagaggtcccctacagagacgggatgttggagacccacgggaatctggcttgtgggaattgcacagcaccctttttatcataccgcagcatggcctttcctgtctcgattgtgggaagctggagtgcctctgcaatgttcagtagtgtgcttgggttttgagggtcaaagatttttaatctttgccacaggcatgttacacatcttaaaattgtgtggtctcaactgaactgctccaaggagaagaaacactgccttgggcgcccagtgttggattacaggtgtgagccaccacacccaggctgtattgccactttcgagcgaagaaatgggcaaggcagaataaacaagttatgaattggctagtctgaataatttcagggagctccagagtatatagactgcttttagctagtaactagtactggggtactagttcccagctaaaagtaactgagtaagaagggggatagtagctccacatgtgagaacttgccaaagacagttgaggggtagggctgtggaatggctggtttgcatgtgacaggcaagatagcggaggagaaataccctcttgagtaagggttacgagccatgggccttgtgttgactggccaggtgactttaatgaaattttgtcacccaggctggagtgcagtggcacattcatagctcactgcagcctcaatctctcgggctcaggtgatcctcccgcctcaacttcctgagtagctgggattacaggtgcttgccaccatgcccagctgattctttttttttttttttaaatctagagatgagatatctgtgttcgaaacccagtctggtgtcgaactcctgagatcaagtggtcctcctgcctcagcctcccaaagtgctgggattacaggcatgagctactttgcctggctcagcatgtgtttttattctgatattttgacaaatgagaccttgctgatcctggagacactgctcctcttagaggtagcaaaagtctcctccgcttttgctaagttatgaattgctaagccaattcataacttgtttattctgccttacccatttcttcactcgaaaatggcaatacagcccgggtgtggtagctcacacctgtaatccaacactgggcgcccaaggcaggaggctcacttgaggccaggagtttgagaccagcttgagcaacatagccagaccccatctctacaaaaaaaaaaaaaaaaaaaaaattcacggggcacaatagtgcacacctctagttgcagctacttggaggctaagataggagtgttacttgagcctgggagtttgaggctgcagtaagctgtgactgagccactgcacctcagcctggacaacagagcaagaccctggctctttaaaaataaaatgaagaaatgataacacaggctttacccacactttccccttcctcctgtctcctaaccaaccgtgagtcttccctgtttagccctgtgtggcttcatataccccctcttcatgggaactatgagttacacactcatcagtggcagtcttctgatctgttggcatcgtcaacgctaaataataaaatctacattttaaaaaacctacctgaaagcactcatgaatttcaagaatttagcaaagcaaatcagccatttccatgtcatttccaaagaactgtgtcagtgcaccaagccaaatgtgatacttaggttggaactcagtggacagccatggaaggaggagggggtcaatgccaaagaggggctctccagatgcattggtaggacccaggcgtttgagggaccattgtgttagcaaaatctcaaccatctgaggggttggggtttttaggaaggtagctcctgatgcccttctcatagcccgacactcaagaaagctcaagcacaactaattgagggccccaaatacacaacaccttccgatatcattctccccgggccacttcttaatgtttgcaagtttgaaggaagaatgccatctcccggcccgaccacatggtgttttcttgattatcctccctttcatgggcatcctccctcctttcttaagcctttagccatttgtagctgtgtggtctttcaacatctctgtactcttgttcttcctagttccatgtcctggctctcaggtataagaactcacatatgttcaaagtgtgtctcttgatctttgaaattaggcttcagcagtgacagtaatcttttttcatctcagtttcttgacttttggcatacatgtcatttcagccacctacaagcctattttccatctgcatgttcttttgctgtgtgtgtgtgtgtgtgtgtgtgtgtgtttgacataggatcttaggctgggcgcggtggctcacacctgtaatcccagcactttgggaggtcgaggcaggtggatcacttgagattaggagtttgagaccagccttgccaacatggagaaaccccgtctctactaaaaatacaaaaaattagctgagtgtggtggtgcatgcctgtaatcccagctactcgggaggctgaggcaggagaaatgcttgaacccgggaggtagaggctgcggtgaaccaagattgcgccattgcactccagcctgggcaacaagagtgaaactccatctcaaaaaacaaaaaacaaaaaaaaaatagggtcttctgatcatggctcactgcaggctcagcctcccaagtatctgagactacaggtgcacatcactatgcccagctaatttttaaattttttgtagagatgggggtctccctgtgttgcccaggctggtttcaaactcctgggctcaagcagtcctcctcccctggcccccaaagtgctggggttacaggcatgagccaccgtgcctggtcttcatctgcatgttcttttgtcattttcaaaccctttctgaattatcctcacacttcttgagtatcagacatcaccagtctgatcttccatatgtccctatgtctgtatgggcttctccagctttgagttctttgtcttttcctcactctcttcctctaatggaggagcctcttggggctcatgtcacgctcccattacctcttccttgtgttatttctctccacgtcccgcaactcccctctccttgtaaactccccggctacagcaccacgctttttaccactctggtgaaggtcagcagtggctccctgtttatgaatcctaagtccttgtcttttctgggctatggacaggacttgaaactgttgttgtccagtcctttctccagatgtactcttggattctgtaaggttatgcttctggttttctcccctgcaccctctcactccttttcccctttcatgttggtgcatccacgtgtatccagccatttggtgttgaattttttttcttttttttttctctttgagacagagtcttgctctgtctccgggctgaagtgcaatggcatgatctcggctcactgcatcctccgcctcccaggttcaagtgattctcccgcctctgccccctgagtagctggcattacaggcatctgccattatgcccggctaatttttgtatttttgtagagacggggtttcaccatgttggccaggctggtctttaactcctgacctcaggtgatccgcctgccttggcctcctaaagggctgggcttacaggcatgagccaccgtgcctgaccggtgttgaaatttctaaggctttgtcccaggcctcttttttctcttactggtctctccccaggcctcatctgcactcttgggttcagctacctactttagtgaacataccctaaaacgtatttccccaaccctcatctcatacaagtcttactgctctcctttcactccatgcttccctttccttttcccactcgagatggagcttccaccacctgctttgcccagttagcaaatgtgtatccttcattttgtcccagagagcacaccttcacagaagcccactagagcacccagctagctcatacccattctttcatgattatctattgatttgtttggttattgaataatgaccgtatcctgaactcaatttccagcttcgaaaaagcacagaccttgatctagattttctcctaatgttccatgtgcatagtttgtagtcaatagtatgtattcagatatttgttaggtgaatgagccttaatcatttttgacattttaggttatgtgacattctctccccagtaccacctcaggctcgatgatttgcctgaaagtcaaaattcagaaaagaaagtcacacacaactcagaaaagctgttgtactcatggttacagtttattaccacaaaaggatagagaccaagatcaccaaaggtaaaaggcacataggaggaaatctgtgagaaaccaggcacaattttttttcttttttctttttctttttttttttttttttttttgagatggagtctcgctgtgtcacccaggctggagtgcaatggcacaatctcggctcactgcaacctctgcctcccaggttcaggtgatcctctgcctcagcctcccaagtagctgggattacaggcatgtgccaccacactggctgatttttgtgtttttagcagagatggggttacaccatgttggccaggccagtctggaactcctgacttcaagtgatccacccgccttggcctcccaaagtgctgggattacgggtggaagccactgtgtccagcacaggcacaaacttagcaggtgttccctcccagtgcagttgcacaagggcacactgaattctcccagcaaagttgtgtgcaacacattcacagtattgccagccagggaagctcccccaagccttgacgtctagagttttcgttaagggtcattgaggtaggaatgcagaacccacatgaataaccataaatatccagtctacaacccttgcagaaaacaaacatatagcatggcccagggcctcatgcatgcaaaagccagcatccaccatgaatcatattgttagcataaattatctggtcaaacgtgcagcaggacctacttatggttttcgacataaaaatcttaccaggcaagataccccaagaggttgttttcctgaagttggccctaattcattctagggtcagatatcagatagctgcggacagtgcctgtgtcctaaaacctgccaacattattcacagtagcaaatcctattctgtttatgctgcccctgccctgccttgccttgcctttctggtggaaaacacagcgcaggctctgggccttgctttctcctctgctgctgctttctaacctgctctggtgcttccacccgcatggtgtgctctgcctcctgtttctagggatctcttactataaacttcctccataataatcacttctgtatctgattgtcacaccctgcctgactaaatacaatcccaggtatattctagaatacacagggagcctattacaacatccttgggccaggcgcagtggctcgcgcctgtaatcccagcactttgggaggctgaggcaggactgcttgagcccaggagttcaagaccagcctgggaaatatagtgagaccccatctttaaaaagaataaatttttaaaaattggctggatgtggtggcatgcacctgtggtcccagctacttggcaggcttaggtggaagaattgcttaagcctgggagttcgaggctgtagtgggccatgatggtgtcactgcactccagcctgggtggaagagtgagactttgtctcaaaactaaaaataaaaatatgacctccttactgtggcctccaggacactacagaattcacgtccatctatctctgtgattcagtttatcttcagctgcagccatactaaccttgttgcacttccccaaacacgacaggatcctcctgctttcattcccttgtcttaggtgctctctctatgagaccctgttacctcagatgctccattcctccaagtccatgctcagatataactgtcttttagacatttcccaactactctacctccctctaaccttctatattgtttacttttgtggttgtggttgttctttttgagttactgattgttggaattaaaaggtccccgagggccagggacagtggctcacgcctgtaatcccagcaatttgggagactgaggtgggtagatcatctgtggtcaggagttcgacaccagcctggccaaaatggtgaaaccctgtctctactaaaaataccaaaattagccgggcgtggtggtgtgcacctgtagtcccagctacttgggagtctgaggcaggagaattggttgaacctgggaggcagaggttgcagtgagccgagatcgcaccactgcactccagcctgggcgacagagtgaaactgcatctcaaaaaaaaaaaaaaattcctcaagtacaggaatgcataattattttgctatgtacatatctgattttttagagcagtgcctgttgcaagataggcactcaatcgatactcattaaattaacaatatacacatatataaaacagcactttcacatggttatgagtgacctaaggaaaaacagaacaggatgacgttgtagtgggggctgttttaaattgacagtttggagctgggcgcagtggctcacacctgtgatcccagtattttgggaagccgaggcgagtggatcacctgaggtcaggagttcgagaccagcctggccaacatggtgaaaccctgtctctactaaaaatacaaaaattagccgggcatggtggcaggtgcctgtaatcccagctactcaggaggctgaggcaggagaaatgtttgaacctaggaggcggaggttgcatgagctgagttcgagccactgcactccagcctgggtgacagagcaagactccgtctcaataaacaaacaaacagacaggtttgggaaagcctctgagaaaggaatggttggcctgagctaagcgccattaccctgatccacctattgtaaccacctaatgggttcattattttccctgctccccagatagagtcgacttatcaagacaggataattgcaataaagggtttaattcacatcaatcgagctaaatgagagaccagagttttattactcaaataggtctccccaaatattttgagacgagcttttttgtttttgggtttttttgtttttgtttttgttttttttgagacagagtctcgttctccttctgtcgcccaggctggagtgcagtggcatgatcttggctcactgcaacctccgcctccagggttcaagcgattctcttgcctcagccttttgagtaggtgggattacaggcatgcgccaccacacccggctaatttttgtagtagaaacggggtttcgccctgttggccaggctggtctcgaactgcctacctcaggtgatccgcccgcctcggcctcccaaagtgctgggattacaggcatgagccatcacgccaggccttcaattatatttctgcaagatatgttccctgtctaaaagaattcaatttttaatgtttttgaaacttatgtgtttgctaaacaaatacgtgggggctgattttacgatctgaggccaaatccacaaactgattacagggtccaacaaatatttggcgagtgggaggagaggggtaagtgagctggactggtggcgtcctggctgtgagcaggcacagccgcaggcttcagggagccccatcgcggtgaccctggagagtggcctgaatcggacgtgaccttgaagcaaggtggttttggggtcgccggctgcacaaggcgcgaagtggtttagggtcacgggctgcacgaggctccagcacgtcaggagtgggcgtctgttcattcccacgtgcatcgcggctctctcctagttgacgcatgcacaccccgtgggtgtatgcgttgttcattcccacaacggccatcaccacctctccgcaccctctgtctccttccttctcgggcctcacccctggccctcgctttcagtgcccagcccggaccgcagcactccagttccgccccaacccgggaaccctggactgaggctcccgtttctgtcctttctattgggcgcacttccgatggcgtcaggaatttcagccaataggagccagccaggaagtacctctctgagcggttggtgccgggtataaaagaaggccgcgcagccacggctgctcacgacgccgcggatcccgaagcctgtgtagcagtgagacatcagtgaggctgcaggacgagcaggattggaagcgccccggccagaaagtgaccccccacccctttcaggaccctgtgaacgggaacagccatccagagggttcaggaaggcgtccgcgccctcacctcttctccccatgagctcccccagagctgtggtgcagctgggcaaagctcaacctgcaggcgaagagtgtgagagccagcgccagagaaaggacgcagggaaggctggggactgggccaggggtcgggtgcacagaagacacatgtgttgacatctcccctccctctcctcctccccaacgctcttcttttctccccactccctcccttccctccaattctttctttcacctctccctcccctactctctcctccccttcctttctctctgcctcttcttcacctcctcctcccctccctaccttaccttactctttcttcttccccttacctctccctccccctctccctgccttccccttccctctctttctctcctccccttcttcccctcacctctcgctccctattcccttctctactgttctcctctcctctctttctctccccttctccttccctcccctctcccttcctatctccctcctcctcctctctttcagtggctacagcaaaccaaacagcccagcagcccagcagcccagccatgtgagtcccttgggattggtatctggaaaaggaaggaaggtgggacgtggggatgaagaacagactgggtgtgtggggtgctggctcctgggaacgagaactactgatagggctgggtctgtgtgagaagggaaagcggcagaggaaggatacaatgaaagaggaaggggagcattggcatccctgactttccctccgcctaccctacctcccaagctgaggcttttttcttcctctcctgtcaggcggcgcctcacagtcgatgactttgaaatcgggcgtcccctgggcaaggggaaatttgggaatgtgtacctggctcggctcaaggaaagccatttcattgtggccctgaaggttctcttcaagtcgcagatagagaaggaaggactggagcaccagctgcgccgggaaattgagatccaggctcatctacagtaaggacagtctctgcttcctctttcatctttgacgtctgagcccagcattttccccaaatactaaccccaagtaaaccctgcacttgtaccttgaagacttctctgcagttcattccatttacactacctcctaccctgggtcagacactcgaatcctggttcctgttctccgttctcccctcacttgctcccagatagggctgttgttattctggtcccagcataatttgccacttgtgtgaccaggcagtgacggtggcatcatatgataggcctcagggagaaatctgactcttccaacattaatccttcagacaccccaatatcctgcgcctgtataactatttccatgatgcacgccgggtgtacctgattctggaatatgctccaaggggtgagctctacaaggagctgcagaaaagcgagaaattagatgaacagcgcacagccacggtgaggtgcgggtctggaggctctggggtctctgagtttactgtgggctggtgggagctctgtttgtggctgtcaggagggtccgcattgccttctgagaagtttacttctgaatgttattgtgtaaatttaatataatggcacgtatgttctacagctttatccttggataccctaattaacctcattgtatctccagaatattaataagtactgcgtataggtttggattctttggttataagcaacagaatctaactccactgccttatgtaaagaaacatattgaaaggctctgaaggagttcactgaataaatagctagaactggcttagagataggtacaaagagatttctagagggttccggaaagggaaccatggcaatgattttcccaggagcaatggtccaatcagcttgctgtgtcaggatgagtggtcttccatctttcctcctgtttctgtttcacttcctcgggcctcaagtcctgtgagagatcatctgagtggctcaatgtaggttctatgtctggctacttgctgtgctaggacaacagggaggatctgtgtccatgttaccatccatcctataagaccacataaaaaggagaggaaaaccacaccccacacaccagtaactggtgcaatttaaaaggaggaaatggagttactggaccaaaaagattccactgtaatcatacaattcatggtaagtgttccacctcagacggaaattgtggcaggcttcacttccagggtgacttttctttgcacccacagataatagaggagttggcagatgccctgacctactgccatgacaagaaagtgattcacagagatattaagccagagaacctgctgctggggttcaggggtgaggtgaagattgcagattttggctggtctgtgcacaccccctccctgaggtaggtcaggtggtggtggtagggtgagttctgagtaccagttaggaatgacccagtttaatgtatttcatgtgtccatgtgtaaaacctagatacgaacttggggtttctattggaatactgcctttttcttttcttttcttttctttttttttttgagacagagtctaactctttcacccaggctggagtgcaggggcacaatctcggcctcccaggttaaagcggttctactgcctcagtctcccaagtagctgggataacaggcatgtgccaccacactcggctaatttttgtatttttagtagagacagggttttgctatgttggccaggctagtctcgaactcctgacctcaggtgatccgcccaccttggcttcccaaagtgctgggattacaggcgtcagccaccatgcctggctgaactactgcctttttcttttctttttttttttttttttttttgagacagagttttgctcttgttgcccaggctagattgcaatagtgtgatctcggctcactgcaacctccccctcccaggttcaagcgattctcctgcctcagcctcccaagtagctgggattacaggcatgggccatcacacccggctgattttgtatttttagtaaagacgggtttcaccatgttggtcaggctggtctccaactcctgacctcaggtaatctgcctgcctcggcctcccaaagtgctgggatcataggcatgagccacgatgcctggccaatgctgccattttcaaacacctatacttgatatgtattcgtagatttaaataatgtggtccaatcaaaccttttattttctgatctttgttaatatataactataccagtaagtttgcatgtaaataaagtcattgctccacaattccaaaggagtgcatttttctgtatgaatgattttcatacagaaattttcttaccataatttatttacttggctctcattgatacaccatcagtttgttctagatctttcttaatgctgagaatattcttgtgaaaacattctggagcatgagctaaatcactgtgtgaataattccaaaatatggatttattaatagtaggccccagtacttttctgaaccttgatccatattaaaaatttgtctctccaaactcctgtgcttgggagggactttccagggtgtcctagggtctccacatctcaatgaaagctggggaaggagaatttccctcatcctgggcctctgcttagtacttattcccttttctgccttcctctaggaggaagacaatgtgtgggacactggactacttgccgccagaaatgattgaggggagaacatatgatgaaaaggtggatttgtggtgcattggagtgctctgctatgagctgctggtgggatatccaccctttgagagcgcctcccacagtgagacttacagacgcatcctcaaggtgggacagtcacctttgggcattcatgggggagctggtcagtgatggctgctgggctgtgggcacacacacacacagggttgtcttctgtggtccagaacagcgccttaacaaggctcaaagaagagggaggacattgatcaaagaaattaaccagacttctctttcttctttcctggcctcatcaggtagatgtgaggtttccactatcaatgcctctgggggcccgggacttgatttccaggcttctcagataccagcccttggagagactgcccctggcccagatcctgaagcacccctgggttcaggcccactcccgaagggtgctgcctccctgtgctcagatggcttcctgagccctgtctgcctctgttccctttgtgtgtgttcagggagctctcctggctctgccacctcatttgtctttatttttttctcttttaagatgtaagatgctaattaataaaagctgaatcatttcataccagctcttcatagttgtgtgagttattatgtgactgggtagaatctttatttcttgtgggaactctttcccatgagagctgcccaaggttgttctccctgctacccccaccttccacctcgggagatggtgacttcattcttctgaaaactcttgcctactttcaggtcaggcacggtggctcacgcctgtaattccagcactttggaaggccaaggcaggcgcaacacttgagttcaggagttcaaggccagcctggccaacatggtaaaaccctgtctcttctaaaaatacaaaaattagctgggcgttgtggcgggcacctataatcccacctacttgtgaggctgagacatgagaattgcttgaacctgggaggcagaggctacagtgagctgagatcgtgccattggagtccagcatgggagacagagtgagacaccgtctcaaaagaaaagaaagaaaactcttgtctactttctgcagataaattccctgagggtacataaacctgccacctatcacagtggctccttgatccaacttactattctccatgttttcaggagtatgccatttgtaaaacaggactgtcatcaacccaaaggtccactctctttttatggacatcaatatgctgctgtctcagaaataaaatgtttcactgcacgtcagtgcaacccacttcttaagtgaatacactagcacctctgtgttgtgttgcactctgatgacattagaataagtcattcctcataataaatgtaatatcacctcttctgaaattactgcatgctgcaatttggggagtggccttccagccttctgtaaccttctgtgacagcttcatgtggcagctgctccctgcacccattataaactgactaccacagtaagcatctagactcctcagctgtaagctcaaatgttttttgatcaatgcagtcagttacaccagtatttctcctaactttagttgttaagcactttatatggagtttgccttgttaatgttactcctatcattatattctacaaagtctcctcattgtgaaatatccagcagttgcaggcatgatttctgctatgaccagacccactacgtaagcataaataactcagccacttcacttggatgaaaagctcccactattgcagatctataagttaaatactccaagacattggttcatggtttttaacctgcactttcagtatttacctcttttttgttttttctttcttttacctgcatggggagacacagtgcttacctctatatgctttgcttcatcctatcagttttcctgaattaacattttaaacacttggcaattcctaataaattaactggttcacacatataaactcttacacattttaggtgctggataaacacatcactgggcacatttttggcaggtaaggatagaaaaatcactagggcctcagcactgatcaccagatgatatatgtttaaataatgaaaactctgtcatgctttacatgagggatttgaaagtgtccccaggccgggcgtagtggctcacacctgtaatcccagcaatttgggaggctgaggcaggcagataaacatgtgaggtcaggagttcgagaccagcctgaccaacatggtaaaaacctgtcttgactgaaaaatacaaaaattagctggccatggtggctgtaatcccagctacttgcgaggctgaggcacgagaatcacttgaacctgggaggtggaggttgcagggagccgacattgcgccactgtactccagcctgggcaacaaagtgagactctgtctcaaaaaaaaaaaattgtcaccaatatctacatagctttcttcagcagcactgattccagacattccatgatggaatataaatatactaactttaatatctgttctgcatccaaagcgaaaactaatttaaccctacgggtcatacacatatggaaaggagaattattcctctcttctaaattgggcaaattagtattgtcaatgatgagtaacagtgtcaacagcttgcacgctaattaagcaacatttctcaataatctcattttacaaataataccttctagaaaattgattccatctacatttccacccagttaacatcctgtcatgatactttctccactttcaaatctctggagggcattttctgcacaccttgtttccattttcataaccatatgtattgtcaaatcattgaaagctggattttattctctaaccttcatagtcatgagaagaaaaaaaacagtcaccaacggagactacaaaggttttgtataatatgattttttttttttgagacggaatcttgctctctggcccgatctcggcccactgccgtctccgcctcccagattcaagcgagtctcctgcctcagcctcccaagtagctgggattacaggaacccgccaccatgcccagctaatttttgtatttttagtagagacggggtttcaccatgttggccaggctggtctcaaacacctggcctcagctgatccacccgcctttacctcccaaagtgttgggattacagccgtgagccactgcactcggcctgtataattcttaaaagattgttatgaccctaacatgactttgttgctttcttgtttgcaaccagttagttcagggttgtcaaaaggccaaaattacaacaaatttagttttagatctaattgacttttgtttgtgattcatgaattgaggcaatctctgttctacacaatagaaattagagttcccactgggcaatggcagaacagtgggttttgtaaggtgggaacaataaaatagaacaatagaaaaaaaagctgattggttaacagattactttttctaagggttaaagcagaggggacttcctaatttcactaattcaggtagactgaaatctgcttttaggaaaaactgggatctgtctgcttccttaaaacttcagtttgattagatgacatttagtatgagagacgccattttgatttggtcagtgaggcctgctgtaggagctccaaaacaatggcctcctgtaatttttgtttaacaatgttcacctctttccattcctttctccatctatgctcattttttttcatggtcttgtccagtatcataacttgaaataacagtgtttgccaaaaacttccagatttttatgtccaggcacaacttctctcccaatattcagtcagagattgaactgctgtgacacagacactctgtggtcatacagacatttcaaactgatcatgcttaaagttggagtcatgagctcacccagtccaagactccccacgttaaggaatgtcaaatctactctaccagggctctcagccaatacctaaagcaaaagttgctggaccatgtgaagaccaagcttggccaaagaaggcccaagagagacaatgcatttgcaacatgtcccagctggacagggtcttgctctattgcccagactggagtgcagtggtgcaattacaggtcattgcagcctcgacctcctgggctcaagagatcctcccatctcagcctcctgagtaactggaattacaggggtgtgccacaatgctcagctaattaaaaattttttttgagtaggctggatgctgtggctcatgcctgtaatcccagcactttgggaggccaaggtgagtggatcacttgagcacaggagttcaagaccagcctgggcagcatggtgaaactgactacaaaaactacaaaacaaaacaaaaaaaccctcaatttgctgggcgtggtggtgcgtgcctgcagtcccagctacttgggtggctgaggtgggaggatcacttgaaccctggagtttgaggctgcagtgagctgtgatcgcgccactgcactatggcctgagcaacagagcgagaccctgtctcaaaaaatatatatataaatatatatataaatatatatgtgcatatatatacgtatatatacatatgtatatatacgtatatatgtatatatgtatatataaatatatgtatatataagtagagagagagagagagagagagacggagtctcactctgtcgcccaggctggagtgcagtggcgcgatctcggctcactgcaagttccgcctcccgggttcacatcattctcctgcctcagcctcccgagtagctgggactacaggcgccagccaccacgcccggctaattttttgcatttttagtaaagacggggtttcatcgtgttagccaggatggtctcgatctcctgatctcgtgatctacccgcctcggcctcccaaagtgctgggattacaggcgtgagccaccgcgctctattttttttcttttctttttcttttttttttttttttggtaccaatgaggtctcgctctgtcgcccagactgttctcaaactcctgtcctcaagcgatcctcctgccacagacttctgggaccacaggtgtgcgccagcacactcagcttattttaaaaaaattttttttttttttggtagtctccctatgttgctcaagctggtcttgagctcctgggctcaagcgatccgccccccttggcctcccaatgcgctgggatcccaggcctgaggcatcgcgccgcccgacgtccccctttggttactctgactgcccgctgatctgtataagaggatccggaggggaaataatgcaaggtggaagtcagagtccggagcctggtccagggtctctgcactggccctgaccctggcaaatgtccctgactcctggggctcgatttcctccggccaagaatggacggtctcgcgcttggtccctggcctccgagttgtgcccccaggacagaggcaggtctgagccgggctgtaggcccgctgcgacttttacaccgaggcctgccggctcaggatctgtcccctttgcaggtggtttgtagagaaaaactacattaactacaaggcattgccaggtgcgacggcgggccctggggccaatgatggtccaggacaggggcgtttcctgtgggttgcgaagcttggggcgggacttccggcatttggatgggacgtaatttgggagcgacggttccgtccacgccggctctagggagggggcggtgttccgtggccgcctccctggcggcgctggggaaatgagcaggtaggaggccgacagcgacctccgcgtctcggagcgaaccgtgagcctccccgtaacgagagagtttgactgtcagccaaggtcaccgggcccggcgcagggaaggggtggggctcggctgagcccgcgagacccgccctgctcgccgcagcccccgccccgctagggccacagggtcccggtatggcgatggctttgacggacccggcgcaggtgagtggacaaggtttcggccttgctgcttttctgctagttcggggaagcctcctgggcaggccggaagccaagacagccacaggattcctctttgtagttttgtttgtttacgaaacgtggagcaggctcgtcacttagtttatctcctgtcgtggtagtacctgagagactgaatattgaagcggacagtaggcagactatacatcgattatagggctgtgacgtacaatttttttgtagcaacctgcccaggaaaccagcctcctgttctgcaataaactactctggaagccagtctgccttaagttagtcttgcaaggagctagattactctctggtgacatttcaggaggctaaacggtaactcctggaacagtaggccccaaataggacttgatttgtaactgactgttctaatttttgcctccgcctccaaaagaggaccaagcagagaaagccatacgtgctcagcctaaccaatcacatacgatgccccacttctagttagcccttctgcagctttccactgctaaagtgtcaggcctctgaaagctgcttaataattgcttgaaggatggatgaagttccactccagggactcccgtcacacacatcatccgaactcagccttggcctgcaagtccctacccggtccactatggctgaccacctctgtccttgtttccttcctttcctccctggctcagcgcttcagacacaggtccactatggctgaccacctctgtccttgtttccttcctttcctccctggctcagcccttcagacatatcaatctgatcacgcagagttctttcctacccctcagccttcacctttacagttcattcagcctcagacactatcctcagatctctgcaagaccctttcacatcttgttggctctgctcaaatgtcacttctttaaagcggcctttcatggcagttcagactaaagtagtccccttctcacctgcccttggtctagcgtttttgtatagagaatctggcaaagttttagacacctactgagttgaggtcttaaaggattttgtggggacaaagagcataaataataacacaagaactgtaacggttggccttcattgagtccttgatgtgaactgagaaatgggcattatttatcatctcatttaatcctgatctccttaaagtgacattctattataaacactgctgtacacaagaggaggtcaagactccgacctgtttagttacctgctgaaagtcacatagcacttaagtaacaaactcatatttagcgtgtggaccaccagagcctttgtttttacagacagttggctgagaagccctgaggtgaactttgcagtctttccagcaagtcacagtggccattggaagcgaaaggcagacattccactagagaggactgtgtagacaaaggcaaagtgtgttggttgtttaaggaggtccaagaggacttatgaggttaccatggttccccccatccccacctgctgagacatggcctggaagggcaaaatcctgtggtcttttgttggatgttcgtcctgccttcagcctatagggcattttggccagtcataagcctgggttctcatgaccacagcctgcattatcttcagccacttgagttttctggtcctgaagcacactggccttagggatacctgctggcaggactcagggaaggaaaaggctaatggttcattatgcaatctccctggggtccaggggagaggatgagctggtccaggcactgcccctcgtcaggcatttggtacttgtgaatttggtgatgagggttttgcccacatcttggggatattttcaggagctgctaaaatagattaaatagcaaaaatatgtagaaatgcttcacaactgtattatagtagattcacgtgggtggtggaggattattggggtcacagtattaaaccctgaagcagagggacctgggttaaaatcctgtctcttatatataaatcatgcttataacatgtaaaactctggctgaacttggtgctcacacctgtagccccagtgctgtgggaggctgaggtgagaggatcacttgaggctaggagttcgagaccagcctgggcaacatagcaagatcccagctctaccaaaaagaaatagttgggcgcagtggtgcgttcctgtagtcccagctacttgggcggctaaggcagaaggattgcttgagcccaggagttcaaggttacagtgaactctgagcatgccattacactccagtctgggtaatagagtgagaccctgtctctgaaacaaacaaacagaaaacacaaaagactaggagaatctgtggagctcccttagcctcaggtcagtgactgtgacatggaggtgattggcggtggtgtttagtaatacttcaggggctgtgggaggattaataaaatcccaaagtccagtaagctctgaataactcatgtctgttattgggaaaatgggaattctgtattcatctgaaaattgaggcagagataaatgaggtccctgaggtcacaaaactggcaagtgtcagtttcaggagtttggattcaaacttgagaagtctgacttcagagtttgggacttgtagttgctttaaaacagaacatgaagcttcagcatgagctggaccagtgaggctcaggcactgtggttgtcaacattattgctattattattgtcactatttcctcatttctttgaggtcctcgaactctaattgtctacatctcgccatccacgagttattgccattgtcttctgttattctttgatggctcctatataggaggcttttctcttttacattacagtaatctgtccaaagcaatgtctgccttcctccttcagcctggtacaaagttaggccctcaggaggccctcagtgacttgggccttgatcttgttgcaccttttccagcaaagcacatgcaatagtcccacagcaaactctactacctctatttgacatttcaggtgtctgtgacctttgatgatgtggctgtgactttcacccaggaggagtggggccagctggacctagctcagcggaccctgtaccaggaggtgatgctggaaaactgtgggctcctggtatctctgggtaaggccttccccctccaccatgcaggggatctgccacctccttcgttccaccctctgactccaggcctgatgggtcaagaagtcctctcttactggccttgcctccttcccacaaattcagtcattttctacaacactcacctcttccttttttttttttttttttttttgagagggagtcttactctgtcacccaggctggatgcattagcacgaactcgggtcactgcaacctccgcctcccaggttcaagcgattcttctgcctcagcctcccaagtagctgggaagctgggattacaggtgcccaccaccatgcctggctaatttttgtattttcagtagagatggggtttcaccatgctggccaggctggtctcaaactcctgacctcaggtgatccgcccgcctcggtctcccaaagtgctgggattacaggtgtgagccaccacgcctggcctacactcacctcttcctatacagtctccatgcatcgctttggacaagaaataagagtactctttggctctcagccaaaggagagaagctggtggaaggaaatggggtgttttgcagacctcaaaggtaggattgccagctgtatgttatgaggggttgaagtaggaactgagaaccgccacgatggggtcctggtttctctgtctgggtctgctcatgtcactgtctactctgtatggttttttctgcctcagcgagttcaggggaagagtaaccaccccaggttttactgtttgtgacccctccttcccctccagatttcttgtctgtttctctggcctctgtggggcgtgtttgaggcagcaaatgctgctccacctccagctcatacttgcctccatctctcacccactgcccagcatagactggcctctgtctgcagttttttttttgagttccagagcgggatctgcctgggtgggcctggttgctcatgtatctgctccacagcccagtctgtggtgtaagggttggtgggatgttcactaagaagggttgagtcaggcaggccccaaggagacattgaccttccgtcccaccaggtgttattctaaacaaccttcacgtccttcaatcaccttcacatcctctgattctaaagtcactctgctgcagccttgctgggcttcttgctatttccccaagtgcccacccacctcaggccattgcatttgctgttctctttgatgagtgttctcagggtaattcagcatttcacatggccgccccttctcagcaccacttgcctcctcacccagcccttccctgaccaccgaatcttggggaggcccctttctcaccatagcctcctccctttacctttttaatgtctttctaagctagtgtttctcaaacagggacgatgttgagcttcagtggacactgggcaatgtgtggagacattttggttgttaaaactaagatgatgggccaggtgcgatagctcatgcctgtaatcccagcactttgggaggccgagatgggcggatcacaaggtcaggagatagagaccatcctggctaacacggtgcaaccctgtctctactaaaaatacaaaaaattagccgggcgtggtggcgggtgcctgtagtcccagctactcgggaggctgaggcaggagaatggcgtgaacccaggaggcggagcttgcagtgagctgagattgcaccactgcactccagcctgggcgacagagcgagactccatctcaaaaaaaaaaaaaacctaagatgataacattgacagctagtgggtggagatgctgctaaacatccttataatgcacaggacagatcctttctcctcctcttcccccgatctcacaaacaaagaattacctggacctaaatgtcaattgtgctaaggcgagaagctctttttcagagagtgcttggacagacactacatcagctggtgctgagagacacttgaggaagttgttcttttatttcttctcgtcttgtctccttagcatttgaggaaaactctggtttagtgctgagacttaacgtcctgcaaactgttggtaatttccccttttctacagagggagcagccttaggctcacagccctgaacaagcagcatgagctcacagggaccaaagagcactgtttgtttgtcttgagacagagtctcgctgttgcctcggctggagtgcagtggtttgatcttggctcactgcaacctgtgcctcctggattcaagcatttctcatgcctcagcctcctgagtagctaggattacaggcaggtgccaccacgcccagctaatttttgtatacgttgttttgatttattgctacattttcatggttacctgccatcaagacaagtgactctggattttccatttaccagagtgataaggattccatttttgaagaaatctaagaaaaataaaaagtggatcacttttaagaaaagcagcccgggcatggtggctcatgcctgcaatctcagcactttgggagggcaaggcaggcagatcacgaggtcagttgatagcgaccatcctggccaacatggtgaaaccccgtctgtactaaatatacaaaaattagctgggtgtggtagcgcatgcctgtaatcccagctactcaggaggtggaggcaggagaatcacttgaaccagggagttggaggttgcagtgagctgagatcgcgctactgcactccagcctgatgacagagcgagacttcgtctcaaaaaaaaaaaaaaaaaaagaaaagcagttaacagtccagatccccagagcactgattgggtgtctcaggcctgttccaggcagtgttcatgctccatttattctcacaggatccctgtcctcagcaaagtaaggaaaatttagccactcctgtgagtccctcatccagtttaacttactcagcacagatgaaacaccttcattttatgaagctatcactgaatgtttttgtgtagaaaaaattcttctcttgtgaacttttttttttttttttgagatggagtttcactcttgtctcccagactggagtgcagtggtgcaagatcatagctcactgcgatcctcacaccttaccgtctccagtagctgggactacagatgcgagccactgcgctgctatatgaagtttctgtaaatatccttatgtcaccatatcacagtaggatgttcagtctttaaatattttaatggttcgtgaaatgctggggtctggagtcactgacctgcccctcatcctggccgctggtccctgaggatgaatcctccagctcacatctctgcctcgtcaccaccctctgccacccactctggtgctcgtggtttcctccttactgtatttcttgggagagtagggtttgaagccagaacgctggtgtccagccccagctctgctctttaaaaactccatggccttgggcaagttactgaacttgcctgtgcctcagtgttctcattgttcaaatgaggacttaaccatattcgcatcccagggctgttgccagggtcaagggttattttatgaaaaggctcagaacagcacctgggagaccaggctgcgtgcagggagccattacaatctctgtttccaccagtactattaccgtcgtcctcatcatgattattgtcgttggcatgccttgacctggcactttctgggcagcgttgtggagctttgtggttaaacagcacagacagagatggcaggacctgggtttccttattgactcagccattctccagttctgtgctcttcagcaaatcactttacctccccgagcctgggtttctttgtcaacaaaatggtgttgattatgatatggacttcctgggtataccgtgaggaaatcctcaactggaatcctcatttaatggctaggcatggtggctcacgcctgtaatcctagcactctgggaggcctaggcgggtggatcacctgaggtcaggaattcaggactagcctggccatcatagtgaaacctcatttttactaaaaatacaaaaaaattagccaggcatgatggcacgcgcctttagtcccagctactcaggaggctgagtgagcggagatcgcgccactgcactccagcctgggcaacagacgcatttagtctttggtttagaggaagagcattataaaacattgcttaggatgttaaaaaaaaaaaaaaaagacttagataagtgaagatacataccttgttctgaatgaaaataatcaatgtttaatatttaaagtgtatcactttttctctaagatattccataaatattgttcactttttaatgcatttaaatgcttggcatagtcccctggacatggttatagcctataaatactagtttttgacttactattaggagtagagattctgtggcagcatgacatgccctgcccttggtttctagatcacgtgctaactttttgttcccatggatgggtgtagcttcattccaaggtctggtccccatcctgaagtcccagactagattgaaggtctttatttcttttcacccacatccatgtgtccacttgctttctccataaacagggtgtcctgttcccagacctgagctgatctaccacctagagcatgggcaggagccatggaccaggaaggaagacctctcccaaggcacctgtccaggtaggagccaagatctgggcaggtcggagtccctgctggcttgagacttcgaggagaccactggccctgggatctcttgggaagcttctcactgtggcttctctaagggtttgggagccttggagccctttaacctgtggtttctccgtcctcccagccccatcgcacttgtcgccactcctggggaggagtgaggtgtgtgaactgagactggtcctggggctgcagccttgtgtgccggaaccctggttagccagtcatctactctgtgaccccagtgaagtttgtatatgagtttggctaagttaataccaactgctgtatccaacaaactccaaaatttaaatgattcacacatgaaaactctttttcactcataccaaggtctgtgtgggtcagcagggaactctgtaccacacagttattcaggacctagagtccttctgtcatcaacctgttgctttaaggttgtcctgacatcttcttgctggtagagaattaagggaataaggaaagtcatacccacttccagacctcccctcacatctcacccatgggaactgggcatttggctgtacttgggtccatgagtctaggaattgtggctgagctgcctgtccaaggagaagagcagatggtctggtgagcacctactcagtccactacactcagtctgttcctgaaaaatgatattagaaattatttttataaaaaacaaaaaagaaaaacattatttttatgccattgggcagtttgaagttgtaatcatgtgatacattaatgcataaaactgcatagtttctgagccatagtaagtgacttatcaaaataagctatgagtgttactcatgtcatataaacattgatgagtgatgatacgttacatttccttctgaactctggggaatagggcctttcttactctcccaatttctctttccacttatattctgcctatcagcctctcccaccttctccttccacccattccctgagtgtcaatcagacactaagaagcagtagtttgcccatgtcttcctatatctcctgttttccaaaaacctcagggtgacatttgaccttctgtgtcccacactcaggctgctgagggcactgaggccatctgtcatgtgtgtggattggtgccactgcagagccttggcctctgcccgcgtgggttccttgagctgctcatccaaccctgagtgtctgtgcagtccctgttcagcccttcagagtctgttccagattgtcccctcctcagtgccacatctgcacttgaaaatctcaaaagcacaaaactcaacatgcctaacaaggaacccatgatcttgctcactcctgccacctcccaagtttccgtgaatggttctgccatccaggcagattaggggactggccccaacctcagacaagtcaacccctccacctccatgagtccctgcatccagcctatctccacagcctttcgatttcacgtcatgcatgcctcctgaattcatccctctatcacctccatgagacctatccttctgcttttttcttttttgagatggagttttgctcttgttgcccaggctggagtgcaatggcgcgatctcggctcaccgcaacctccgcctcccaggttcaagcgtttctcctgcctcagccttccgaatagctgggattataggcatgcaccaccacatccggctaattttgtatttttagtagagatggagtttcaccatgttggtcaggctggtctcgaactcccgacctcaggtgatctgcccgcctcggcctcccaaagtgctgggattacaggcgtgagacaccgggcccggcccccttatggtcttactctaaactcttatcatcttttttctaggggatgttaatagactcccaaaacttaatctctgtatctgctttgtgcctctggtcagctctttgtcctgcgtggggtactccagcattcagaccttgttccagacagttaatatttccccagcaactcagcatatgactgctgatgtattagcaggttttcgtgttgacagtgtcatctacttctattgtttaatcggcagtccttacacattcctctcaacctctcatatcggtagcttctcttttcccctggtggaagaggtcttacccttggccacggccagttttttcaagagtttatattatacgttttcatggacgttttttcttcacttatattccgcttgttttgtaacttcatcctttctgtactcaacataaaaatatgctcaacttccttacccttgaagaaaattcaacaattcagtgttcatggttcacagtgtattcatatattcattcactgtctgagcacttaattgtttacatgtttttatatcagtgatgctgtggacatttatgtatgttgttcatctttcacatgtgtagggacacatttttgatgtttctggagtgaaataattggattatagattatgcaaatgttctagtttgcaagatcattctcattgttttctaaagggcctatatcaaaaaattcctctcaggaatttttggaaggttccattgatccatatcctatctaatacttgaaactataaggcccctcaatttttgccgattaaatggacacaaaatattatctgttgtgctcttgatttgcattttcctcattggtagggtggtttagtgtctttcatgattctgagccaatctatattttcttctgtgagatgttatttggtgataaatgcctttttttcaattaacttctttggctttctctttttgattttatttttgtacattatagatacctatcttttatcagttacatttgctgccggtatattcttctagtttttaattttgtccttccactctttttaaagtatcttttgttcaatgagttccttacatagcgtagtctgatttatgttttttttttacgtgattaatgattttgtaccttgtggaaaaaatgttgctttaccctaatgtcaaaaaggtattcttgtttattttattgtaagttgtaaaacttgccatttggcattcaagtctttatcaatctgaagttgattttgagtatagaatgtgatagaatacaatatttccattccccgtgttggtagccaatttttctagctctaattccttagtagtctctcatcactgaggtgctgtgcctctttgccatctaccaaagccccatctatgtgcaaggggatttctgagctctctgttcttctttattcccagtttgcattatgtctgtgccagagtggtacctctgccttatgagctctgtcctgagagtggcactgctcttcacagctgtcacctaggtcagaatcttgggaatcagtccccctgtgcctcatctttccctagattctcatcaccaccaccctctcatgcactgtagctcatttgcatattctttctcctaaggctatagtgtctttctcacattctctcgtgacaagtgggacttacttcactgggtaccttctattggaaaactgccttgatctttttctacccaggattagccaaactcaagataaggacacagtcctccaggactttgtcaagtctacccaaatcctcttaattccaactgcaaattcagggatttcctgaaaccaaccttaggtttcataacttgctaaaaagactcacaacactttctaaaacctattatactcacagttttgtttattacagacaaagcatacaaattagaagaggacacgggatgtggggctgaaggggttccaaacacaaagcttcctcagtaacttgttacccacccagcattgagtgtaaaatatgtgcacagagcattgcaaacccaggaaactcactggagctctggtttttagagtttgttgagcttcattacacaagcacggttaatcgagacattgcccacattgccatgtgaagtttccagccttcgtcccttttccagagttcagctgatatcttgtggctcagagacctaaccttctactcactggttggtctttctggtgccaccagacctcagccagagtcatctatttaggataaactatttaggtacctataatgagttacctttatataaatatttagtctggaattgaagcgatatctccactctaggccctgtcccctcacctggtctctctgcctggtctccctttcaaggagtcaggaatccaaggaaaataaaagaaacaaattatagatctggggttcaagatggcaaaatataacagacataaaggcaccatttataacttcattttttttactgaagtggtgagtttgtttcttctctttttacattactaacaagcccttctgtgtgttggatttctttcaggtgacaaaggaaaacccaagagcacagaacctaccacctgtgagctagccttgtctgaaggaatctctttttggggacaactaacacaaggagcttcaggggactcccagttggggcaacccaaggatcaggatgggttttcagaaatgcagggagaacgcttgagaccagggttagattcccaaaaggagaagcttcctggaaaaatgagccccaaacatgatggtttagggacagctgatagtgtgtgttcaaggattatacaggatcgagtctccttaggagatgatgtccatgactgtgactcacatggatcaggtaaaaatccagttattcaggaagaggaaaatatctttaaatgcaatgaatgtgaaaaagtgtttaacaagaaacgcctgcttgctcggcatgagaggattcactctggagtgaagccctatgaatgcacagagtgtggaaaaacctttagcaagagtacatacctcctgcagcaccacatggtccacactggggagaagccctataagtgcatggagtgtgggaaggcttttaatcggaagtcacaccttacccagcaccagcggattcacagtggagagaagccttataagtgcagtgaatgtggaaaggccttcacccaccgctccacttttgtcttgcataacaggagccacactggagaaaaaccctttgtgtgcaaagagtgtggcaaagcctttcgagataggccaggtttcattcgacactacatcatccacagtggtgagaatccctacgagtgcttcgaatgtggcaaggtcttcaaacacagatcatacctcatgtggcaccagcagactcataccggggagaagccctatgagtgcagtgaatgtgggaaggccttctgtgagagcgcagcgctgattcaccactatgtcatccacactggagagaagccctttgagtgcctcgagtgtgggaaggctttcaaccaccgatcctacctcaaaaggcaccagcggattcacactggggagaagccatatgtgtgtagtgaatgcggaaaggccttcacccactgctctactttcatcttgcataaaagggcccacactggagaaaaacctttcgagtgcaaagagtgtgggaaagcctttagcaatagggcagacctcattcgccacttcagcatccacactggagagaagccctatgagtgcatggagtgtggaaaggccttcaaccgcaggtcaggcctcacaaggcaccagcggattcatagtggagagaagccctatgaatgcatcgagtgtgggaaaacattttgctggagcacaaacctcattcgacactctatcatccacactggagagaagccgtatgagtgcagtgaatgtggaaaggccttcagtcgcagctcgtccctcactcagcatcaaaggatgcatactgggagaaatcctatcagtgtaacagatgtgggaagaccttttacaagtgggcagacctcagtcaacatccaagaacttttattggggaaaaactttttgaatgtcaccactgaggaaaatcttttgcaagaggaagcatcttacatggcatctgatcgtacataccaaagagaaaccccacaagtgtcttcactgtgagaaaaccttctgttgccaaatgtcatttgtcacctaaggagtcatattagaaaatcacgcagcttagagccttattctccatccgaattcatcctggaaaaacacccagtggttattacgcacttgggaaaacctttagctccatctttctcattagtttacagtgcaatgttatctcaggaatttttataaacagaaagaggtgacatagaaaagaaaatgaaatgcagacactgcttttatactgttgtcttgtatgtacatttctgtcctgtgtcaggaaagttagtaagggaaggtctggaaacttactcaatgtctttgttctacaacattgtctcttcttaagaagcattgtttttatgagaaataatgaagccttgagttatgaaatacttttatatttaaggattaaaagaaacatgaatgcgcacattttattgtaccacttaatactgtttaggtctttgattttttaaaaaaattcttttttaatgggttttaaacactaacactgagaatttttcttgattcccatctgttggtttacttgattgctatagctgtatggtaaatctcaaaattaggtaatgtgatttcttttttcttactatttttatttaaaattcatttagcattcctagtttgactttccatatacactttaggattggtttttctgtttttcaaatattcttgcttggattttgatagaaattgagttaaatctatagatcaatgtgttggaaattggcatcttagtcttccaattcatgaacatagcctatcttttcattatttaaattttctttgatatatttcattactgttttatagtttacacagtataactcctgcacatttaaaataagaattatagctgcatagttttttgagtgattgtaaatggcattgatatttaaagtttcaatattcacatgatgttggctagtatacagaaacattattttttcaatcttattttgctgtcttgcaaccttcctaaactcattatttcttgccatttcttttgggagaatccttaggattttaaatatagaaatgtcatttgcaatttgggacagttttatttcttgcttcccatctgtataccttttatttgcttttctcatgttattgtactaggtaggatttccagtgtgatgttgaatacgaatagtgacaagttatccatgccttgttcctgatattagggggaaatgttcagtttctcattattatgatgttgaaagttgcttccaaagagtttctctatcgagtttagaaagtttccctctattcctaatttgctgggatttttttggttattattaataagtgttgaattttgtcatatgctttttctccaccaattgatttaattatgtgatgttacttctatagtcagttgatatgatgtgttaccttgattgagtttcaagtattgaaccagcctcacatctttgtgataagccctacttgatcatggagtataattttgtttgtgtactatgctacagtatttcatttgctagtattttgttgaggaagctttcctctgatttcatgagtgataatctgtagttttctttcttcaactgttactgtttggttttgatgtctagatgataactaacctcctaacatgaattggaaggaattctcttctgtttttttggaagatcatgtgtagaattggtgttatttgttcctttaatgtttggtagctttctccagtgaagaagtgggacctggagattttccttttgaatgctttttaattatgtatttattttatttaataggtatagaactattcagagtatttcatattggatgaatttttatagattttcttaaggaagtgttcattttatgtaaatgttctaatttgtagcattctttgaaatatttccttttatcctcttgatggcagcaggatctgtacttatgttccttgttgtattcttgatattggaaatgtatcacttattattgtcagtctttgtagacatatgtcaatttcattgatcatttcaaagaaatagcactttatatcactgatttttctccagtctctgttcttaatttcactgatatctgctctgatgtgtattgtatcctttctcctacttgctctggttgtatttgactcagtggtttcctgacgtggatgtttaggttattgatttgaggctttttttcttttttaatataagctttaagttctatacatttttcttacactgctgttagtttcatcccacaagtcttaatatgcttttgattatcttactcagttctaagattgcctgattccttttgagacatcttctctaacccaggaattatttagaagtatattgtttaatagtgtttggagtattccctgctatttgttattgatttctaatttgttttgcatttgatgttactgttgaaatttgttgactttttttccttatgacccaggatataggctgtcttgttttacatagctgcttgaaaagaatgtgtgttctcggtcatttggtggagtttctgtaaaagtttgtatgatcctgttagttggtggtgttatttaggtctcctgtatccttgctgattttctgtctagtatttctatcaattgccaagagaaggatgttgaagtcctgagctataattgtggaattacctattcctcctttaagttctatcagtttttgctccacataatttaaagctctgttgtttggtatatacacatgtaggtttgcttagtattcttggtgtattgacccttttataattaagtaatgtccctttttgttcctgttaatactcttatcaatttttatctgatatttgtgtggtcagtcttacgttttggttaatgcttgcatgatttacacttcatcatttttttaaaccttatctatatcactatattgggagtaagtttcttgtgaatggcgtatatttgggctgtggttttatatccagtttgcgtatctttttttttttttttttttttttttgagacggagttttgttcttgttgcccaggctggagtggagtggtgcgatctccgctcactgcaacctccgcctcctgggttcaagtgattctcctgcctcaggctcttgagtagctgggattacaggcatccgccaccatgcctgactgattttttgtatttttagtagagatggagtttcaccatgttggccaggctggtctcgaactcctgacctcaggtgatccacctgcctcagcctcccaaagtgctaggattactggtatgagcaaccacgcacagcattttttttttttttttttttttgagacggagtcttgctctgtcgccctggctggagtgcagtggcgcagtctgcaacctctgcctcccgggttcaagccattctcttgcctcagcctcccaagtagctgggattacaggtgcctgccaccacacctagctaatttttatatttttagtagagacggggtttcatcatgttggtcaggctggtctcaaactcctgacctcaggtgatctgcccacctcagcctcccaaagtgctgggattacaggtatgtgtcactgtgtctggccccagtttgcatatttctgtcttttattggtgtatttagaccatttaaagtttacaataattatgttagtgctatgtctgctattttatgattagttttttgtgtttcctgttgcttctttcttggtttgtttgggtttttttttttttgtctttaacattttttagaattccatttgatatatttgtagtgttttttaaatatatttctttgtatttttgtattaattttttagtggttgctttaagtagtataatgtacatatgtaacataattacagttaatggtatgaaaaatttagcactttgatgtatagaaaccttacttggtcccttcaccttgcctgttaatataattgtctaaagtaattcctcttcaaaattgagcaccatgttggaaaatgtaatttttgcttccactgtcaaatatattttacaaaagtcacaggaagtattgcttgttgatctctttacccattccactattctttcttgaaattctaagccaccttctattaacattttctttctgtttggcgaacttgtgtaaccttttttctagggtcagtctgctggtgtctctaaaagtgtctttatgttcccttcattcctgagggatatttttgtgggataataggatttagggtctgcagttcttttagtacttgagaaacatgtttgttccttctgtccgctatggtttcagatgagaaatctgttgccatttgaaccattgttccctagttcataatgtgccatttttatcaacctgcgttcaaagtgttttgttttttttgtagtgttcagaagtttggttatgaggtgtgtgacatggaatttttttgagtgtatcatgtttggtttttgtttagctttttgatttgtcggtttatgccctttgccaaatttgggaatttttaaccattatttcttgaaatattttttcatccctactctttctcctctctgtgatatgaatggtagagcttttgttactgtctcagaggtctcttgtgctttcatgtttaccccctttttctggtctatttttccctttttttcatattggttaatttctgttgactttttttcagctcactgattctttttttctgccatatgcagtctactgttgagcttgtccaatgagttttcgttttggtttttgtatttttcagttgtttaatttccatttgttttgttttgttttgttttgtttttttgagacagactctttgctctgttgcccaggctggagtgcagtggcgcgatctctgctcactgcaagctctgcctcccgggttcatgccattctcctgcctcagcctcccgagtagctgggactacaggtgcccgccaccatgcccggctaattttttgtatttttagtagagacggggtttcactgtgttagccaggatggtctcgatttcctgatctggtgatccacctgcctcggcctcccgaagtgctgggattacaggtgtgagccactgtgcctggcctccatttggttcttttgtacatctttgatttctttgcttagtttataatactaaagggctcagaaaacagaaaaaactaaattccagagtcatggttttctggtggtttgtctcaatatttgaatagaaatcctaaattatctggaggagtagaagtcctgtaatcttttatattgggcttcttaaatatttctgtcaacagatcttatatcagggtgatctgcatatcattcagagttacgtactccacgggaaggttgtatgtaaaatcctccagctctgtaagccttgttatatcctcaatggagaaggggtcattccttttctaagatcactcttacacttttttattagacacacacacacccttccccaaccaaacttgtctaagtcctctgtctttcatactcttgtttagtctttaacttctccttattaaccagcttctttcccataatgtatagctttagtcggatctcaagcctcgtttccaacctatttcacccttccttgcctatcaagctctggttattctttcttccacacacatgccctgagtaactattctgtgcactgtcgccacccctttacatttccttttactccccagatactactaaatggcttccaccaccgttgcctgacttaagcacgtctcagaaaggtcccttttgaccccctcactctctttttggacctccatactgctaaatctctgacttgaaggtcctttcctggcttctgtgaattcctggcttttttcctttttagggtctgtgtctttcttccatctgtaaaacagctttacttcccagcatccatcatgatcattgctgttttctaacttgtccttcaccccatgactgagttaatttgcgctgaagacactttactctcaattatctacagtgtttccctaaatctgtgtctccaggttggatgtttctcatgtcgttaaccactggtcatccttccacaccttttctgtatttgcactcactgagcctatatgcatgtatcatgtggccatgaccttggccgtggggatgcacccataatcatcataagagaacacaaattattactgtgtatcagacattgtttcgaatgttttacatgcgtcagctcttttaacctttatgacaactccataatgttatttcccccctttaactgattagaaaactgaggtacagaaagattaaggaatttgtcaaagatttcacaattatgaaatttgggtttggggactggaagccactgcactggcttcagaatccatgtccttaaccactttattgcttctcataaggtgggtctttgtttcctggtcatcacttgtttttactaaaatgggtcaaactgtgctcatttatttataatctactattcttatttgacagtacatcttggccattccttcaagcaaatgagataaaccagactcactctttaatgcctgcataagctattgtgactgtagaaaagacggagaatgtctgggtttgaggatatgtgggaggggtggggagaaggagtagagaagggctaaggcatgcatgttgttttaggtgtgtttgagatgcctgaagaacatcagtgtatccccctaatttctgtcatgttactcaaaccagacacattgtggccatttctttttcctttatcattcccacgtccggccactgccccattcctttttgttccgtagtagaccctcaatatatatgtgtgtgttggtaaatggccatacacagcagggtattttttattattattttcagttccctcagcgcgtttaccacaaagctgtgcatataggtggcaccatatatggcgtaccttgacctcgaagagaatctacatggacttttatggacctacgtacacaattttagaaatcataataaatgaatgctggagtcctcaagaccccttccagatttgatttgctaggaagactcacaggactcagcattttgtcatactcaatggctatgatttaccacaccgaaagaatccagagcaaactcagcaaaaggctcaaacccaagtccagaggaaaccaggcacaatctttgagaatcttaatgaaatcacacaggatgtgcttcattgaagctccatctgggacttaaaacaacacacgtgagatgtgttccaggaagtcgtcttgagcacccattgctcagagtttatattggacttgctttctagcacataccacaattgtagacctccagaagaacaggaggtgttcagcgtaagacaatttaggcacacggagctacttctcattactgggaacaatgggaaacttcccaaaacctaaagtacagactccagccaaggatgaaccttgcaagatcaaagaatagcagtctctggcctgctctgttctctttttcacagtaacttaaatggaaaaatgctgagttagcttaagtttctgtaacaaacattaagcaaataaaattttctataacagaaataagccatagctttgagatgaaggcttatatacgtgtaaaccattgtaaccaagaaaaaaaaaaaaagtcagagtcacagtgaaaatacttaacaaactagccaggatttaattcagtgatgacagggaacagaggaagtcttgtgagaaaggatcttgcctctgcctagtatctttcacagataggcttcaagtggtttgatttgcagatacaccctttcttggcctttatttcggcaaagatgtgatgggtaggtaaatgccgtgttctttccctagcacgtatgtcagtttctcatccactctttgttcttgctattgaaagttgtagcttctggctacaacagagatagttgaagaatatggagttcgccataatttatcattaaatgtggataatttgagattaaagaatatgttgttgcaggcttagtcactttgatggatctgtctgtgagtttcacttggaggaagtgggagcagttggcttcagctgagagggcccttacagagacatgatgctagagaccttgagaaatctggtctcttgtatatgtaactcctctttgtactcagactccggcccacagatagcctttcctttccactgtggaaagttggggaggctccacaatgctcagtgatgtatttcaattttgagaattgaatatttttaatgattgctaagagatggattatttttgctcatagcaaaatctgtttgtgtttcatatctcacaattggaaggtctcagctaaattgtaaatggacagtttcttttgcctctttcggagtagtgtcaagagtgtggacctgggagacagactacctgcttatactttctgtccttgttcctacctgctggaaaggacattcatagccactctgcctcacttaaattggagatccatgtattcacatgtttttattatgctggctttgagagagaagatctcactgtcacccaggctggagggcagtggtgcgatcataactcactgcagcctcaaactcctgggctcaagtaatcttcccatctcagactcccaaagtgctgggattacaagcatgagccactgtactggctattctgctgtttggcaagtggagccttgctgatcctgagagactgcccatcccaggactagctaattttaagtggtagcaaaggactcccctgggtatgtgcctttgatatgcaaccaaacaattcagtgcccattcccttcccccaccccctttatcaaggcctcacacatggagccactatcttcctgccataaccactccagggtcagatattaagcaagtagggacagttcctaatgaaattcaggcctgtaatctcagcactttgggaagctgaagtgggaggatcacttgagtccaggagtttgagaccagcttgggcaacatagtgagaccccatctctacaaaaagatataataattagctaggcatggtggtgtatgcctgtactcccagctacttgggaggctgaggtgggagtattaaatgagcccaggaggttgaggctgcagtgagctatgatggtaccactgtactccagcctaggtgacaagagtgagagcctgtctcaaaataaaataaaattaaaaagccaagcctaaccctgcttagcttgcttaccttgtcttgaccattcttacctgcaaaagcacagtgaaggttcttgcccatgctttcccccagctcctgctgtttttccgatcctgctgcttccgcatgtggtcctacactgcctggtgtgtgcccctttcttgggaagtgtgtgtagctaagcatctcttcaatggcagtatctcctgatctgttggcctcaccatacctgaataataaaattggcctctcaaaatgccacctcaaaccattacatggaagttacatttccgtgtaatttctagagtactgggtacctacatcaggcaacatggtatagaaccatggattggaggatggattgatgccaaggagggactgtttaggtgaattactaggaaccagacatccaagggaccactgtgttggtgggatcccagtgatgtcagtagtcaagactttagaaaaatagttccagatgcctttctcattgttggacacttctgaaaaaggccaagcacaactaattgagggccccagatatacaaacattattctgtcatttctccaagctgtttgaagtttgaagtttgtctttctgtatattatttcccagtcctacctacatcatttgttcttttttttttttttttcttttttctttttttgagatggagttttgctcttgttgcccaggctggagtgcaatggcgcaatctcggctcaccgcaacctctgcctcccaggttcaagcaattctgtctcagcctcccgagtagctgagatcacaggcatgcaccaccatgcctggctaattttgtatttttaggagagatggggtttctccatatcgaggctggtctcaaactcctgacctcaagtgatctgcccacctcagcctcccaaagtgctgggattacaggcgtgagccaccgcgcccggcccatttgtttgcttgatattctcaggcatctgcattaactctcttttcttatgatctacggcattgcagttgtatagcctctcaacatacctgtttgcccttcccagtgccattccatgtccctgctcttgggtaaaatgacacgtgtttgaagtggtcccttctcactctgtctcttgttgatccctggaatcacacataagcagtggtcactttctttgcaatcttgagtttcctcctgacatttgccttcgatgtcatcatggccacctacaagcctgtttttcatctgcatgttcttttgtcacttacactttctaagttatctttgcataactgacttctgcttgagtgtcagtcaccaccagtctggtctttcctgtgtgtgtatgggtttctccaacttgattatttgtcctttcctccctctcctcctttaatagaggagcctcttagggatgttttccttttttgtgtaatattttcacttctccattacctctttcttgatttctctccacttcccaaacctctactctttgtggaactccttgctacaatgccaccttctccgacattgtgactaaggtcagaagtgacttggtgcttataaatcacaagtccttgtcattcttgggccatcagtagaattttattgtgtctaatactcaattcgtgaaatatgttctctttccttggctctgtaacatctttttcctcattcgttccctccctctctcccttctttgtgcagtcatccatatctagctgcccactcaatgttgaaatacctaaaggttttgtccaaggctcttttgccttgtatggcctctccccagcctcatctgtgcccttggcttcagttacctcccttactttaaaggcattgaaaatagaataccccagtcttgagcaatccttacagctctggacctgaattaccagttatcttcttgctatcttcacatagatgtttcaaagatacctcattcttcacctgatgtaaataagatcaataaaatgcttctccctgactctgatctacttcagtcttccctctttactacatggcactgtttagttacgttggctagaaatttccaactcagcatagttacctcaatctcttcctccttcatgtacaatcagaaagttgtgtttttttgtttgttttttttttaacacagaatctcgttctgtccccaggctggagcagtggtgcgaactcggctcactgcaacctccgcctcctgggttcaagcaattctcctgcctcagcctcctgagtagctgggattataggtgcatgccaccacacccagctaatttttgtatttttagtagagacggggtttcaccacgttggccagaatggtctcaatctcctgaccttgtgatctgcctgccttggcctcccaaagtgctgggattacaggtgtgagccactgccccggccccatcatttttaattcttaaatatctctcaagtatgtccacttctctctaccacctcttcctagtccatccactcaccatctatcatctcaattagtgtccttttacccacattttctcttcaatccattctctaagctgaaaccagagaaccatctcagatttaatagtgctctgcttcgccctccctctgcccccactacgtttcctgaaaactttttatggcttcaactcttgggataaaaaccaaatatggccaggtgtggtagttcacaactgtaatctcagcactttgggaggccaaggtaggaggattgcttgagcccaggtatttgagaccagcctgggcaacaaagtgagacctcatctctaaaaacaactcccaaatcattacacggtcaatcctttgggctttatctgagctttatctggtctgggaggtgcctcatttactacctttcatcttgcataacttatgccctttctgttttcactttgtgtttccttttcccacctgccatggggcttttccaccacacactttgtccagtagtgaatatttatccttcatcccagctacgtcataagcattctttcataaatatctgtgtgtgtgtgtgcatacacatgcatatatatttaggtttgattactgactcctgactgtctcaccaactagatttccagcttcaaaagagcacagatgttaatatggattttatcctaattgttccatgcacatagttcctagtcagtagtagatattcagatatctgctaaatggatacgtggatgaatggccttaatcatcttgatattttaggttacttacctcaggcttcatgatttgctagaagtacacacaagactcagaaaagctgttatggttatagtttattacaataaaaggatatagaccaggatcaccaaagggaaaaatcacatagaatgaagtccacatgaaagcaggcacaaaactctgggtgttatctcccattacggtcacatagggacacacttaattcccccagcaaagatgtgtgacaagatgttcacagtattataatacaagccagggaagttcactcaagcattcatttctggggtttttatggagggtcatttacataggaatgcagggtccacataactagtcatagccatacagcccttgcaaaaagcaaacatacagtgtggcccagggcctcgggcatgcaaaatccagcattcaccatgaggaatattgtcagaagcatttgaaccacagcaaatccgtcttgaataggggctgggcaaaatgaggctgagacctgtgctgcattcccaggaagttaggcattctaagtcacaggaggagacaggagtttggtgcaagacactgctcacaaaaaccctgctgataaaacagcttgtggtaaagaagctggccaaaaccaagacggccaaaacccaccaaaaccaagacggccaaaaccaagacggccaaaacccaccaaaaccaagacggccaaaaccaagacggccaaaacccaccaaaaccaagacggccaaaaccaagacggccaaaacccaccaaaaccaagacggccaaaaccaaggtcatcctcactgcccattatatcccaattatgcattagcatgcaaaaagtcactctcagcagcaccatgacagtttacaaatgccatggcaatgtcaggaagttaccctatatggtctaaaaaggagaggaaccctcagttctgagaactgctcacccctttcctgggaaactcgtgaataatccaaccctcctttagcatataatcaataaataactataagtagccttagtccagcagcccaaactactgctctgcctatggagtagccattttgtattccttttttttttttttttttttgagacggagtcttgctctgttgcccaggctggagtgtaatggcatgatcttggctcactgcaacctctgcttcccgggttcaagcgattctcctgcctcagcctctcgagtggctgggattacaggcatgtgccaccacgcccggctaatttttgtgtttttagtagagatggggttttgccatgatggcctggctggtctcaaactcctgacctcaggtgatccaccctcctcggcctcccaaagtgctaggattacaggcgtgagccaccgcgcctggcccctttactttcttaataaacttgctttcattatggactcaccccgaattcttttttgtggaagatccaagaaccctcttgaggtctggattgggaccccttttcagtaacaatgttcttagaataaattatctcatcaaatcgatacatgaaggcctatggactcaggcttaaaaattacttttaccaggcaaaatattccagaaactcagagattgtcttcctggagctgatcaagggccatttctttctttagaatgtatagcatctgagcaactgaagcctgatgagttcacactttcgtgtataaccaaagccctggccctagcctagaatctcttacagcaaaacaatcatatttactgagcatctacatttagtataacatttatataagatatatcagcagtatcatcatgaacatgctgagccactggagcagctcgtgtggggaatggatagatttagaaacaacaatccatcccataaagccattcatacttttccatatatttgtatcaattcaattactcattgttctccttgatctactgttaattgtactttgtggtaaaccacctcccctctcactacattggcttaagttatcctccaccttgcacatctggaaagagccagagctccctaacaggacttctccctcttgcccctcccatattccaatttccatagactacccagagtgatccttttaaaacataaatcagtccaggcacagtggctcacgcctgtaatcccagcactttgggaggctgaggcgggtggatcacgaggtcaggagatcgagaccatcctggctaacacggtgaaaccctgtctctactaaaaatacaaaaaattacccgggcatggtggcacatgcctctaatcccagctactccagaggctgaggtgggagaatcgcttgaactcaggaggagaaggttgcagtgagccgagatcacgccatcacactccagcctggcgacagggcaagactccgtctcaaaaaacaaacaaaaacataaatcagataacatcacagctctgctcaaaaccccatgatggctacccatttcacagtgtattagctatattttcttattttctgcattgttgatgctatggaatttgggaccttgccatttagagttaactgattcttagagattgcaaatgactcactctgaaccatgccttttatttgcatactaacaaatccagagtaccctaatgtgaatcatctcctctgtctggctcttacactacaggagacaattttttttttttttttttttttttgctctaatgactccagggccaggtactaggcagacagggacagctcctagaccccaaagtctaccaactttattcaaaccagcaaatcctcttctggttacccagccctgcctttcttttcctgtggaaaacaataaaggatctggcctctgctttctcctctgcttctgcttcttataccaccctggtgcttctcacatagccctgcaggatgtgttttgcctactgtttctaaaactccgtgagttgaaagttcttccttcctggcaatcatttgcatgtccgagtttcttatcagaccatactgcaaaaaaccccaggtacatttttgaacacacaggaacatattacaacctctctacgctggcataaaagactacacaatttgtttccatctatctctccaacttccatgcacattcagttccagccgcactaggcttcttggtgttccacaaacacccaggatgctctgtcagttccattgtcctgtgtgttttctctgagtgataacactgtttcctgagatctccacttgatgagtctttaattcctccaagtccatgctaaaacatcactttttttttttcttttgagacgaagtcttgctctgtcgcccaggctggagagcagtggcgtgatctcggctcactgcaacctctgcctcccgggttcaaatgattctcctgcctcagcctccctagtagctgggactacaggggcccaccaccacggccagctaattttttgtatttttagtagagacggggtttcaccatgttagccaggatggtctcgatctcccgacctcatgatctgcctgcctcagcctcccaaagtgctgggattacaggcatgagccaccacgcccggcctaactgtcctattagacctgtcccaaccactctgtattgcacaactggctttatcccactctcactgattcttaatctgctctagtttgtcttatctccgcaacactcctaaccttctatattgtttaggagttttggattattattattttgtgtgtgtgtgtgtgtgtgtgtgtgtgtggtatgtatgtgtctccattgtgactttttgtttttttgtttagaaacagggtttcgctagatagcccaggctggtctcaaactcctggtctcaagcgatcctcctgtttcagtgtcctgagtagctaggactacaggaacaaacccaccaggcccagctctgtatctccactgtttagagcagagcctatcacaagatagtcaagtacttgttgagttaattaattaaaagttagtaaatatataaaaatatattttcaaatggttatgaatgtcctaaagaaaaatagagcagagtaatattggggtgagggactactttaaaatttttattattgttattattttttaaacaaacaggttctctcactctgttgcccgggctggaatgcagtggcacaatcatggctcactgcagcctaaaccgccgtggctcaagtgatcctcctccctcagcctcccgagtagccaggactataggtacccaccaccacgcctggctaatttttaaatttttcacagagacggggtctcactatgttgcccaggctggtcttgaactcctgggctcaagtgttcctcctacctcggcttctccaagtgttgggattacaggaccccacacctggccggaggagctactttagattaagagatccgcacttgagcccaggagttttgagaggagctgggcaacacagtgagaccccatctctacaaaaaataaaaaaaaaattagttgggtgtgttggtgtgggcttgtgatcccagttactcaggaggctgaggtgagaggatcacatgagcctgggaggtggaggctgcagtgagctatgaccctgctacagtactgcagcctgggttacagaggaagaccccatctcaaaagaaaaaaaaaagagtaagagatctggagaggcctctatgagaagggaatggttgatacaagctgagactcattacctggaccacatgtctacaatccaggtggcactggctcaacactgtatcttttacatcatcttgcaaagtgccttccctcagcttctctaagaagtatttgtagagtgaatgttgagtggattttataataatgctgtgaaatccccatggtctcctggcaccactgtaggactgttactgtaggactgcggggtcacccctggctgttaaggccatttccctttctcttctctcagcaaccagcctatggcttcaggggaaacttccagttcaagactgaaagtcatggttttggccctgagatgtatttctgctcctgactccatgagaacaagacagattctacagggaatgaaaggagaagctacaaggaatgaaaggagaaggaatgaaaggaatgaagggagaaggaatgaaaggagaagctgactggagcaaacactagttatgaaaggattccctatgaagtgagacttgagatgaagaggaagcagcagattccagatgaattttagggttggaacccatatattaccttcataaccagagagcctggtattcttgattcttccactatagaccactgatgtggtttgagaagagagtacagaatgacaccactttcaacaatacccagaggcataaattgctccaaagctttttatcaggcttgaccgaacacggtggctcacacctgtagtcccagcactttgggaggccaaggcgggtggatcacatgaggtcaggagttcgagaccagcctggccaacatggtgaaaccctgtctctactaaaaactacaaaaatgtaatcccagctacttgggatgaggcaggagaatagcttgaacctaggaggcagaggttgcagtgagccgagatcacgccattgcactccagcctgggtgacagagcaaaactccgtctcaaaaaaaaaaaaaaaaaaaatcaggctgtttgggttcccaaactgtttgatatttgttctacctcaggttggcgtacctccacatgtttctttccaggctctctgcttgtcccctcaggcagtatctctggatctgggttctaaagctgggagtgggaacaatggcccacttctgacatcctgctttgagggttgagtgctcagtggtagcgggtggccagtggtctcatgtcttttcagctgccctgtcatggtacactactacagactttcagtggggcaagtgtgatgaatccccagtgctcagcatcatgatgcccaaggaagggccttcatctcaccaacactggatgggtggaggaagggagctcctgcctctggggctgcactcactagggatttagcctcagcaagtttctggtggcaagataagaaatgctgacatcctaccctgctgggaagacagccctctgtatggaagctgagagggagagccctgtgttcttgtctgcaacactgtagagtacagtttccatatcattgaactgggagggctgaaggaaagagatagtcttggttcaaataccacagactctcgcagttcttacagaaggacagattctcttgaataaatattttttcatttgatgtatatccttaggactatctccagagacacgactttttttgttttcatttttgtttttaataattttcaacagttttgttggggaataggcccacagagctccttatgctgtcacgccagaagtctctccttgctttttttgttttaaactttttattttctgacaattttagctgtaaagaagcaaagatattacagagttcctatataacttcatgcagctccacctcatgttaatacttcataagcctatgacatatttgtcaaagctaagaaattaacatggtatactactactactactaactgaactacacactgtatttggatttcaccagtttttttccactaatgtcctccagttgcaggatccagtccaggacaccacatttcagttaatcatctcatcgctttagttttctcccatctgtgacagctgctctgtcttttcttgtttttcatgatctacatacttctggagtactcataatgcaatgtcccttaatttgcatttgtctggtattttttcattattagtctagaattgtgggttaaggggaagaacatcagattggcaaagtgtcctccttgtatcatcatagtaggtgttacgtgatgtcaagatgactaaaatggaccaggcacggtggcttacgccctgtaatcccaggactttgggaggccgaggcgggtggatcacaaggtcaagagatccagaccatcctggccaacatggtgaaaccccgtctctactaaaaatacaaaaattagccgggcgtggtggcgtgcaactgtagtcccagctgctcaagaggctcaggcaggagaatggcttgaacctgggaggcggaggttgcagtgagctgagattgcgccactgcactccagcctgggagacagagcaagactccatctcaaaaaaaaaaaaaaaaaagatgacttaagtgatgctaaccttgatcacttggttaggtacttgtctgccaggtttcccctgtcaagttactgttttcattttccacaattagtcactaaatccagccaactcaaggggaagaccacaaagctccactgtctgaagggggctgttggtatctatgtatactatttgcaattcttctttaagattggtttcttctccttgtttatttatgggtgagccttattaattactggttttaatttctgaaaaatcaagtaagtgctcaccttagcaatacatatattaaaaatcaaatgtaagtgcttctatgtgtgttttgtgaatcccgtcttatacaaataaggtaagggagatactaagatttggaaatagttcgtctccaccaaaactcatgttgaaatttgatttccaagctgggcatggtggtgtgcacctgtagtcccagctacctgggaggctgaggccgaaggatcacttgagcctaggagttcacagacagcctgggaaacatagtgagaccccatatgatatggtttggctgtgtccccacccaaatctcatcttgaattgtaactctcacaactctcatttgtcatgggagggatcggtggggggtgactgaattatggggcagggtctttcctgcgctgttatgatagtgaaggagtctcaccagatctgatagttttaaaaacaggagtttctggctgggtgcggtggctcacacctataatcccagcactttgggaggctgaggtgggcggatcacaaggtcaggagatcaagaccatcctggttaacatgatgaaaccccgtttctactaaaaatacaaaacattagtggggcgtggtggctcacgcctgtagtcccagctactcaggaggctgaggcaggagaatcacttgaacccgggaggcagagtgagccgagatcgcgccactgcactccagcctgagcaacagagtgagactccatcaaaaaaaaaaaaaaaaaaaaaggaaacattcagtaagcttgttctgtattcctacacaaagagtataacagcaatatattccacaagagtaaagcaaaataagtaaagttattctaagtaaactaaattagaaggcttttcatgaactgagcaactgttggaactaagctggcatggggttgttagctgattataatgtgcccagaattggaatattgatccagatttttacattacccatccctcttattttttctgagcagcagtcagagatgttggttcacaggaataagcagggtagcttaaattgcagaaacaaacttaaaaagaactaatgagactagaatttaataacaagtataccatagttcttgaaatataatatttctctctccagtttcccatttttactaaagacaaattagggtaagactgatttgatttgctttattatacttggcctgattatttatataaagtgcagcaagaataattattttccacataggcatttttttttttttttttttgagatggagtctcgctctgttgcccaggctggagtgcagtggcgcgttctcagctcactgcaagctccgtctcccgggttcacgccattctcctgcctcagcctcccgagtagctggggctataggcacccgccaccacgcccagctaatttttttgtatttttagtagagacggggtttcaccatgttggccaggctggtctcgaattcctgacctcaggtgatctgccctccttggccttccagagtgttgggattacaggcgtgagccaccacacctggcctatccacttttaattaagctaacttttaaccatagtgctctttaaaaaagaaatcctttcaaatctcttattacccaactttagccatgccaagaagccaatatttctaacttctgaactttaccaaaggttatctcctacgtgcatagagaaaggaaaatttaagacagtctgcggaggagaagagactagacaaggtcacgcagatattaaaccagaaatgacttacttcctaggtggggtatcaaacccaaactgccactgtgaaagtgcagaaaccttagttactgagctacagtgtgggacggtgcctacttcctttcacagaagcctagagtagttaattttgagcttgcaaaggcttttaactattttatatgatttttagagctgactatgacatgaaccctaaaattccttttccctagtaggtggagaccaagagaaggtactgccacatggttaaaaggtcaggctcccaaggacataaaacaaggggagacttcatcctgtttgtttgtttcagggacctgcagctgtttgttactgaccagtttgctgggtcatgttgaaaagtgggctcacaggtgttctaagcccatgtttcatcctacagaaaaacaaattcacagcacaaaatacaccagtttgactagcttagaattctttttcatattaatcaaaactttacagaggagatacacactgatttattatttttattattgttattatttttaccattcattcaaccgtttgcacagagagggagaagtcagaaatctgactggtaacaaattcttacctttttgctggcatgccaggcttctgtgttccctttctctgagtggtcccagtgatctggcttgtggcaccatcgccctgggggccaagcctcattgtaaaggaaaactactttttttcattctgaccagagcaaaacacatgtgatgaaacatacacattagccactctgcttagcacccaatattaaactggcaaggcttaaatttgcccccagataggccctgtcatctttaatccaacctctgacttggagtttcaacatgtggtctctgggcaagatggtcgccctgagtaatagagtaatagaaaagataagaaaggggccgggcgcagtggctcacgcctgtaatcccagcacttcaggaggccgaggcgggcagatcacaaggtcaggagatcgagaccatcctggctaagatggtgaaaccccgtctctactaaaaatacaaaaaattagccgggcatggttgcaagcgcctgtagtcccagctactcgggaggctgaggcaggagaatggcctgaacccgggaggtggagcttgcagtgagcagagatagcgccactgcactccagcctgggcgacagagcgagactccgtctcaaaaaaaaaaaaaaaattatatatggaaatgctttcgcaggcaatactttcccaggaaatattttccacaagcaatactttcccagggaaggcaaaatgatcagggaggccagagaaagacccacccattgcagtgacactgaaaagttcaggcggctacggctgctgtcgtgaagggatttttttccagcagtcccgtcagctctcaagtttccccttttgggggaggaaaaagctccccatgtcccacgatcctgtacacgcctaaccctgtcgcccggagccatcagcaaagagtgcaaggcagattaatccaaagacaatagcagttaacatcccacggtgccaaacctcttcttagccaagagggactttactgagaggggtctctaaccccctaaatcttagaagggactctaatcctcctaagttgggcctctaacccaaggtcagtcaagcgtccttgccttttattaagaggggcctctaatccactctgccttaggagagactctaactcccctaacttgagcgtctatcccaatcccattctttacctgggtaccccaccacttacccaaagtcatccaatcagtgctgcagtctatttcctttgagtcaggggggtctcctcagcattgtcccttttgtggtttgcgagaaaagtgttacccgaccccaccacttacccaaagttagcctttgggtcacgggttcctgcagtatagtctcttctgtagtggccaggaatgtgttacaggaaaggggtcccaatccatatcccaagagagggttcttggatctcgcacaagaaataattcagggcgagtccacagtgcaagtgaaagcaagtttattaagaaagtaaaggaataaagaatggctactccatagacagagcagccccaagggttgctgggtgcccatgtttatggttatttcttagtgacttgctaaacaaggggtggattgttcatgcctccccttttcagaccacatagggtaactccctgacattgccatggcatttgtaaactgtcgtggcactgatgggagtgtagcagtgaggaagaccagaggtcactcttgtcaccattttggttttggtggttttggccagctcctttactgcaacctgttttatcagcaaggtctttatgatccgtattttgtgctgacctcctatctcatcctgtgactcagaatgccttaactgtctgggaatgcagcctagtaggttttagcttcattttacccagctcctatttaagatagagttgctctggttcatatgcctctgaaaaaaccatttaaatttaattataagagtctggccagagggggtggctcacgtctgtaatcctagcactttgggaggccgaggtgggtggatcacctgaggtcgggagtttgagaccagcctgaacaacatggaagaaccctgtctctactaaaaatataaaattagccaggcgtggtggcgcacacctgtaatcccagctactcaggaggctgaggcaggagaatcgcttgaacccgggaggcggaggttgcagtgagtggagactgtgccactgctctccagcctgggcaacaagagtgaaactccatctcaaaaaaaaaaaaaaaaaaaaaaaatttaagagtcacaaatatgtgaaaaagagaatgatgtctttatcaattttcaaaaattactattgccagtgatgaataacagtgttccttgcacactaatttagccaaaaatatttctccaaaagtaccgcatcgtgtaggaaattgactccatctccattccttgactattttcaatctcaaaattaaatctcttggagagtactttctgcacacctttctatttccttaaccatatatatcgtcaaaccattgaaagctggactttattctctcactttcatagtcatgaaaagaaaaaaaaaaagttactgatggggactcctaagacttcgcataatataatctttgcatagtctaggattgttaaaattcctaacaagactttataaactctcctgtctgcaaccagttaatgctgggttgggccagggttcccctctttcccgtcacttatccatctacgctcattcttttcatagcctcacccaatatcatgacttgaagtaacagtttacagtaataactcccaaatttatatatccacgctcgaaccctctgccaatgttgaatcataggttgagtatatggcactacgctttgtggtcttactgacgtttcaaactgatcatgcttgaaatgggagtactgggcttcccggcaagcctgctccactagcagcctccccacctcagggtacgggaagtccacacgtggcgaacgcgaagcctattacatcacccggaagtccctgcatcctacgaaggctgggcccggccaaaggaggcccaatagagggcggtctgtcctttcccagcaggctgggcacactgtcaggcgtcctcctttgggtggctattttaactgctcatttatccttttcttctatgaaaagatccagaaaagaggcaaagcaagcgagaagtcgcgggcccagcccacagcagggtaagcacctttgttcggggtctgaatcggggcgaatatccccgcctcctgacctcgattttcctgagctagaagggacctttcgaccctccgacttgtgcctatactaaggcggtggccctaagacgacgcgggggttctggtgcgcacttacgtgcagtcggatgcgctgggtgagttcccacacccggtagatgtaagggaaaaactgcattacccagaaggcactgccccttgcgtcggccgcggactctgggccattgacgacccaggacaggagagttttctgcgggccagggcggcggaggcgggacttccgcttcttcgtgtgacgtcatctccgtgggccggtttggccctgaaacagtgtggggcctagagcgctgggtgggcgcgttctgcggcctgagcagggacgggtagtgaagcggttacgccccttcttcgcgtcttggcgggagcctgacgccccgcttctcccctaacgaggtgtcccaccggcgcccgccgaggcctaggcctccgcagccgccctccgtctcctcagccccgacgctgcgccttgggccttgtgcgcatttttttcgggggaaaactgaggctcggagtgcgaaagtcagccgaggtcgccccgcccaggacagagaagggctgtggtcggctgatccgcggcattcccgggatggcggcggcgtggatggctccggcgcaggtgagtggacgaggtttcggccttgctgctgctgtgctatttctagaggcctcgtgggcaggctggaagccaagacagccacaggatttttctttgtcgccatcgtttatttaagagaaatggccgtggcttgtcatttcctttatccgcagtcctgcaacagtgttggcctctgataggtgttcagtccgtggttgaaggagtgatgcttccttctagggatctcatcacacttcccctaaatccaaccttctctgttgcctgccagcccgtaccccatccacctggccaaccacccctgaccttgtctgtttgcatttttccctggtcctttgctcttcagagccaccaacctgaccgtgcagtcctcttccattttccaggctttctccttgcacttccttttacttcgaacactgcccctgtaactttgcagggcctccctttcacatccttttggcatctgtccaggtgtcacctatttggaggtgccttttttggcaattccggctaaagtggcaccttacacccttgcccagagtctggtatttttgtgtagataatctgatggtattaaagaagcttgtggatttgagtttgtcaaggatgtaatgggaacaaagaaaaataattgcaaagaatgatattaactgtcattgagtccttgctgtgggctgatcggtgagtattatttaaccctcagttcgtttaaccctgaaatttttttttttttttttttttttttttgagacggagtcttgttctgtcgcccaggctggagtgcagtggcgtgacctcggctcactgcaacctccgccttttgggttcaagcgattctcctgcctcagcctcctgagtagctgggactacaggtgtgcgccaccacgcctggctaatttttgtatttttagtagagacggggttttaccgtgttggccacgctggtcttgaactcctgacctcaggtgatccacccatctgggtctcccaaagtgctgggattactctttagaattaggttctgttgtcatcattgttttacacaagagcaatttgagggtcacatacgtccaattacctgccttacatcactgtagctcttaagtttcttaagtcagaaactaacaactggtgtgtctaacatcatagcctgtgtttttaccctcttctttacccgcagtggttagggaggcctgggggtgagacctaaagtaacctttgcaagatgaggcctccttctagccagtgatcttgggcatgaggagtcatggcctttcatactggtggaactgtgtagacttaaaaaatggtatattggttgtttaaggagttctcaggggacctgtgtggcttccacggtggttttatatgtggttccccttactcccttacctgctgacatattctgagagggcacgtttgtatggttatgttgctgaatgtaccctcctactcagccaggatagatgtaatctccagatgggcccatattgtcttggctacaacctgctgtgccctctatgactcttgttgcttgctcatggaatcttctggcctcagggatgcctgctagtaggacttaggtagaaaaggaagcgatggctcattgtgaattctccctggaagcaggtccaggccctaacacctgatcaggtgtcaccacgtcaggtgattctttggtgaggtggatgatgatgactacacttctctgcccttgtccatgggagtggctgaaatgtatatgtggatttgaaatgcttcattctcattaactgcattaactttgctaatagagaaatgtcaggttacataatcagaccagagggccctgggcttaaatcctgcctctgttgataagacctgtgactttgggctgggcttggtggctcacacctgtaaaccctgcactttgggaggctgaggtaggtggactgcttgagcccaggagttcaagaccagcctgggcaacatgggaaaaccctgtctctacaaaaagtacaaaaaattagaccggcatggcatcatgtgcctgtagtcccagctgtgcaggaggctgaggtgggaggatcactagatcacaggaggtcagggttgcagtgagccgacattgtgccactgcattccagcctgggtgacagagtgagaccatctaaaaaaaaaaaaaagagagagacatgaacacatgagactttgggtagactggtagagcggagggtaggactgaggcccaggtctcaggtccctgagtgtgacatagagatgatgatggtaaattcagatgctgtggcctttgcctcagtgtttgtttgtttttttttttttttacaaacagtttttctttctttctttgttttgatggagtctagctctgttgccaggctggagttcagtggtgcgatctcggctcactgcaaccatcgcctccgacgttcaagcgattctcctgcttcagcctcccgagtagctaggactacaggcacacactaccacacccagctaatttttgtatttttagtagagatggggtttcaccttgctagccaggatggtctcaatttcctgacctcatgatctgctcacctcagcctccgaaactgctgggattacaggcatgagtcaccgtgcccagcctacaaacagtttttctttagttcttttgactattcttttttttttttttttttttttttgagacagaggctcgctctgttctggagtacagtgacacagtcttggcttactgcaacctctgcctcccaggttcaagcgattctcctgcctcagcctccctagtagctgggattgcaggcttgtgccaccacacctggctaatttttgtatttttagtagagatggggtctcaccatgttggccaggcttgtctcgaattcctgacctcaggtaattcatgtgcctcagcctcccagagtgctgggattacaggcatgaaccaccgtgcccagccttgactattcttgatgaagtgggaaacacggttatattgacctggaaatggaggctcggcgaaatgaaatgaggtccccaaggtcacatagcaggcacacgttgatttcaggaatttggttttaaacctcaggagtctggctcctgagctggggagtttcagtcactttaccatggcatgtaaacctgtcagcatgaggcaggcacacagggaggattggtaagactcagatactgttcctgttattgttgctggtggtgatgtttttattattattatttcccattcctctaatatgtcagagcacttactgtctgtgcctctcagtccacttgggattgtcctaaccttatttctgtgttaagttcaagtggcttcctgcctaggaggctttatttatttatttatttatttattttttatttatttatttatttttttttgagacagagtcttgctctgttgccaggctggagtgcagtggcacgatctcagctcactgcaatctccgcctcccaggttcaagcagttctcctgcctcagccgcttctgtctcctcttcactgctgtaatccatgcaaggcagtgtccacattccccttgatcctagcacagatcttggccctttggaggtgcttggtgatttggcctttgattctctgtgcatcttttgcagtgctggagtgacaggttctaatcctattccacagttgcaaaggaaacattactggttctttttgacttttcaggagtctgtgaccttcgaggatgtggctgtgacatttacccaggaggagtgggggcagttggacgtgacccagagggccttgtacgtggaggtgatgctggagacctgtgggcttctggtcgcactgggtaaggcctgtcctctcctctccaaaatcaggggcaccagaaagcagcttcattctagccttcatcctggctccaggcctggctagtggaataggtcttgggagccagccctcctgtttcccaaagctttactctatttttttttttttttttttggagacagagtttcgctcttgttgcccaggctggagtgaaatggcgtgaccttggctcaccacaacctccgtctccccgattcaagtgattctcctgcctcagcctccagagtagctgggattacaggcatgtgctcccatgcccagctaattttgtatttttagtagagaaggggtttctccatgttggtcaggctgttctcaaactcccgacctcaagtgatccacccacctcagcctctcaaagtgctgggattacaggcatgagctaccacgcccagcctcatttttttgactcaccttattcttcctgatctctttgtgtcttacttagaaagggttggctacgaaatatagtttgcttttggtcacagccaaaggagagggatgtgttaccaggaaatgggatgttttgtagaacccaaaggcaggatttgcagccaggcccccctgtggcactaatactggttgtctggtgctggcttccctttatgggtctgctcctgtcactgtctttttataatggctttttctggctcagctattgtgtggaacgaagtgaccgtctagtcttgttctctgaggctcacacattccttggcactactacttcctgcatatttttgttgtctctctgttgatactcttctcacttaattctcccagcatccccatcgtcagtgagtaaggataatagggccattgcaatgaacacctcagaaacttaattaattcagtttaagagataaaccttcattgtgagatgctgttcgttgcattttttttcttggtaaaggttctttcttttgtgatgtgttgattttgatgtttgtgcaaacgtctatatgtggccaaatcgctatttggagttccctcccagttttttatttttcagtggttcatgaaatgtcgaagcgtggagtcaccacgtctacccctcactctgctgccctgttcccttaggattgagttcttccactcatgtctcccattctttatggcctccttgttttgagactcctggcaccacacgggggtgttcttcatttcctctgagcacagcacttgggagaccaaggtctgatgcctcagagtccaattccagctctactttttgtcagctgtgtgttcctgggcaaagtactgaactcctctgtgccttaattttctttttagaattttttatttctttatacccatgccagtgcagaaaagtgcctcaattttctcatgggtaaaatgggacaatatgtgccaaaaaaggcatacgtttgtttcattgtactttgctttactgcaccttgcagttactgtatttttagaagttgaatgtttgtggcaaccctgaattgagcaagtctgtcccgcaccatttttccaacagcatgtgctcactttttgtctgtgtcacgttttggtaattcttgcagtatttcaaatatttttattaatattatatctactgtggtggtctgcgatcagtggtgtttgatgttactattgtaattgctatggggcaccatgaactgcaccatgtaagacagctttatcaataaatgttatgtgtgttctgactgctccacttactggccattccctctctgtctctctccttgggcttccatattctctgagatacaacaataatgcagtcaagtcaattaataacactaaaatggaagccagatgcctctaatcccagctactccggaggctgagatgggaggattgcttcaggccaggagttcgagactaggcttggcatcataataagactccatctttttttactttttgaataagctataactcatatgctgtgttgtgcaaaaatcctaagaagtccaggccaggagtggtggctcacacctgtaatcccagcactttgggaggctgaggcgggtggatctcctgaggtcaggagtttgagaccagcctggccaacatggcgaaaccccgtctctactaaaaatacaaaacaattagccaggcgtggcggtacacacctgtaatcccagctactcgggaggctgaggcaggcgaatcgcttgaactcaggaggcagaggttgcagtgagccgagatcgtgccactgcactccagtctgggcgaagaaggagactctgtctcaaaaaaaaaaaaaaaaaaaagtccactcactgaatttttgcttatgtataaacccaagtaactaccacctacatcaatacataggctatctccagctcctcatcagggttttatgccctcgatagcttctttgattctattagctcatatttagacttcatcagcacagattggttggctgttgttgaactgcacagtgtgctctctgacatatctgtcttcttttgatcatcatgtctgtgttattcttttgaggtgtttatatacagtcggagttggttcattctcaatatgttgtagtttctcattgtatgtgaaactgccatccatttgtccattaccctgctgatggatgttcctgttgttttcaggttttggatatgttgctgagagtattattgttcatattttctggtggatgtaaatactgatttctgaattgtgtgttaacagtaaattctgttagaatatactcgtgtgtacatatcaggtcatggagtaggttgtatattcagctttctttttttctttattattttttgtagaaatggagtctcactatgttgcccaggctcatcttgaactcctggcctgcactgatcttccctccttggcctcctaaagtgctgggattataggcatgagccacactgtgtgggtgtgttcagctttaaaagaaactgcccagcagttctgcagaatgtaccatttcactttctgaccatggacatgtgaaagtttccattgctccacatcttcataatcacttgataacatcattcccctttgggaggtctaggcgggcggatcacttgaggtcaggagttatcagcctggccatcatggtgaaaccccatttctactaaaaatttaaaaattagctaggtgtggtggcaggtgcctatcatctgagctactcaggaggctgaggtaggagaattgcttgaacctgggaggtggaggttgcagtgagccaagatcacaccactgtactccagactggacgacagagcgagaccccatctcaaaaaaacaaacaaacaaaaaaaaccatcatttcattttactgtttgagtccctgtggtaggtttctctatatcacagcacagaaaccattgtaaggtcactcctttcattcctaattttcaaatacaacagtgaccataatgataactgatgatggcccacaatttaccgatctcttatgtagtgtctagcactgtgccaagtgctttatagaaattttccccttttttaagagacagggtcttcctctgtcgcccaggctggagcgcagtggcaccatcatagctcactgtagcctcaaactcctgggctcaagcagttctcctacagagtagctggaactacaggctcatgctacaacgtccggctaatttattaatttttttgtagagatgggatattgctatattgcccaggctactcttgaactctgggcctcaagcaattcttctgccttagtctcccaaatgtaacgggattacaggcatgagccaccgtgcccagccaagaattttcctatttaaccctcatcacagcctatgaaacagaatctgagagtttctgtttttcagatgaggaagtggagactaggatcaactaaatcatttctctggcatcagctgacttggtacaggcaagatttgaactgagatgttctgactccagagctacactcttaacctcccttcaatatgaactcacgattcagcacagagttttcatattttgtgcttgagcattgggccgtcttagattctctttctctgttctcactgggctttggttctctttttactctgatcttcacttttatgttggcttcatcagttatctcatagcccatcctttttactcttacatactctccaaggctaatccacacattctttttatttattattattactttttttttttttttaagagatggatctggctatgttgcccaggctggtctcgaactcctgggctcagcttcccgagtagccaggattacaggcagtacctttcagattgtgtctttttctagtattttcaggttattgtttctcagggttgtattgaatttctggatcagtttttagagaattgataattttatattatcaatttcttcattcagttagatctttattgtcttgaaataaagttttattattttctttttcaagatccagttgtttgttagccttttcgcctacctttcaccttgacagtggattctatatgtctaccaggattctgttcaccctctgtcctaggagctctgtcctaagagtagctgtggccatcactagctgtccctcaggcagaatcttgagcatcagcttcgtctccgccccttcctgtctctgaatcctgatcaaccttaacttcttatggggctgcctcctctcactgcagtcctctggattcgctgaagactctgtgtctttgtatattctatgtcctaaggctaatatgtccttctaactttaagctcatgaagcatcctctctgggaagcctccttgacctcttcctgtccctgccccttctaggctacattaagtgccccttccctggcctcttgtagctccttgacatgttcttgagcaagcttatgatagagtgtcatcattatgatgtccacctagtctcatcttgactgtgagtggggatctctattccagaccatctgtactctgcttgagcttctccctctgggtttctctttaaaaatttcaagagttggccaggcacggtgggtcacgcctgtaatcccagcactttggaggcagaggtgggcggattacttgagcccaggagttcgagaccagcttgggcaacatggtgaaaccccatctctattttaaaaatacaaaaaatttagccaggcggggtggctcacacctgtaattctagcattttggaaggccgaggcaggcagatcacctgagttcaggggttctagaccagtctggccaacatggtgagacctcatctgtaaaaatacaaaaaaattagcccagcatggtggcgcacacctgtaatcccagccacttgggaggctgattcaggagaattgcttgaacccaggaggcagaagttgcagtgagctgagatcatgccactgcactccagcctaggcaacagagtgaaattccatctaaaaaaaaataaacaaaaaaaagccaagcgtggtagcatatgcctgtagtccagctaccttggaagctgaggtgggcagatcccgggtgatccgcctcagcctcccaaaccaaagtgctgggattacaggcatgagccaccatgcctggcctttttttgagatgggtttccctctgtcacctaggctggagtgcggtggctcagtcttgactcactgcagcctccacctcccaggttcaagcgattctcctgtctcagcctccccagtcgctgggattatagccgcccgccaccatgcctggctaatttttgtatttttagtagatatggggtttcaccatgttggccaggctggtctcaaactcctgacctcaagtgatccgcctgccttggcctcccaaagtgctgggattacagggatgagccactgtacccagcccatcaaatcatagctattttcaaatcatcactattttcatcttattgttctcaccaaaaaggtggtttcatttcttctgtactatcttaataagttcttttgtgtattgtgttcccttcaggtgacagcacaaaacctgagaccgtagagcctatcccttctcatctggccttgcctgaggaagtctcactccaggaacagctggcacagggagtcccaagatactcctatttggggcaggccatggatcaagatgggccatctgaaatgcaggaatactttttgagaccagggacagacccacagagtgagaaactccatgggaaaatgagccttgaacacgaaggtttggcgacagctgatggtatttgttcaatgatgatacagaaccaagtctcaccagaagatgctctctatggatttgactcatatggaccagttacagattccttgattcatgaaggggaaaattcctataaattcgaggaaatgtttaatgagaattgcttccttgttcagcatgagcagattctccctcgtgtgaagccctatgattgcccagaatgtgggaaagccttcggcaagagcaaacacctccttcagcatcacatcatccatactggggagaagccctataaatgcctggagtgtgggaaagacttcaaccgcaggtcacacctcacacggcaccagcggactcacaatggagataagccctttgtgtgcagtgaatgtggaaggaccttcaatcgcgggtcgcaccttacacggcaccagcgggttcacagtggagagaagccttttgtgtgcaatgaatgtggaaaggcctttacctaccgctccaattttgtcttgcataacaagagccacaatgagaagaaacccttcgcatgcagcgaatgtggaaaaggcttttatgagagtacagccctcattcaacacttcattatccatactggggagaggccctttaagtgccttgagtgtgggaaggccttcaactgcaggtcacacctcaagcagcatgagcggattcacactggtgagaagccctttgtgtgcagtcaatgtggaaaggccttcactcactattccacctatgtcctgcatgaaagagcccacactggagaaaagccttttgagtgcaaagaatgtgggaaagcctttagcattcgaaaagacctcattcgacacttcaacatccacactggagagaagccctatgagtgtttacagtgtggaaaggcttttacccgcatgtcagggctcacaaggcaccagtggattcatactggagagaagccgtatgtatgcatccaatgtgggaaagccttttgtcggaccacaaacctgattcgacactttagcatccacactggagagaagccctatgaatgcgtggagtgcgggaaggccttcaaccgcaggtcacccctcacaaggcaccagcggattcacactgcagagaagtcccacgaacccatccagagtgggaacgtttcttgtgagagcacagatctcattcaacactccatcatccacactgagagtagcccagtgagtgcagtgaatatggaaacgccttcaattgccgctcattcctcctcactcgacatcaacggattcatagtggaagaaaccctaccattgtaacagatgtggaaagactttttacgtacacttcagtcaacatccaagaattcctattagcgaaatagttttttaatataaccactgaagaaaatctgtggtgagaggaaacatcttaccatctggtcattcatactgaagagaaactccataagtatcatctctgtgggaaaacctgttttagatcatcatttgtcatctaaacaattatgttagaaattgacacagccaagagtcttattctacatctgataattcacccatgaaagagacccagtggttactgtgcacttaggaaaaccttcagccacatctttcttattagtttacagtgaaatgttatctcagggacattcaaacaaaggaggaggagtcatagggaagagaaagaaatggaagcacagcttctttcagacttccctgacaagcccatggcaatttgtcatcccctccttattttatttgggagagggaaatgtttcagaaacaaaagggcctcatcccctttattttccctgtgtatacattcactgctgtccagtgctgtagacaaacggtttgtttgaaaacattttgtgaaagcctgctttgttccacagcattgtctccactcttgaggagcagaagcatatatctttatgagaaagatggaggcttgagttatgaaatacttttacatttaaggagataaaggatgtacatatgaatgggcacattttactgcacacttcagacgctttgacttttttaaaaaaattgtttctccgtgtgtctttaaccacccagtaccatacttttttcttgatctggatctacttgtcaatttcttctttatttttctgtaggatggagatgatattgtagctgtttgtacataatgtaatccagggagtcctaattcttccctctgattgtggtttctcagcttttttactgctctttagagagagtaaatagttcaaaattcacctcaacaattttctagaggtcaatttggaaccaaaaatgaaataagacatgtagctaaagtaagttaaaagattatgataaactcagaaaataaacacagagaaggaatctcatttttcagtcttacagaagattgtgtgaaggctgactatacataaagtgactggaattttaacaggtgaacctgcatatgtatatgcaggtagttgtcaccatggattgagtccagtcgtagtaattaatatgtttaatcagaatattttggaatttctcttttggtattctttttgtttcttttattgtttttaattgacaatgtttatggggtttggtgtgatatttcaatacatgtgtgctaagagtaatgatcaaatcagggtaattagcatatccatctcaatcatttatcatttctttgtgtttagaaacattcacagtctgcttttctagctatttgaaaatataaaatgtattattgccaattgtactcattctgcagtgccacagaacactacaacttattcaaatggaatcttacttgctgtaattttgtatttgttaaccaatctctatctgcctctctgctgtccttcccagcctctggttaccaccattctcaaccttttatgcttgcatatgagtagaaacatggagtatttctctttctgtgtctagcttatttcacttaatgtctttcaagctcattcatgttgctgtgaatgacaggtttatttttcatggctgagtagtattccattgtgtatatatgccatgttttctttcttcattcatctgataatggacacttagactgatttcttagctattatgaatagtgcttcaataaacataggagtgtagatctctctttgacgtatagatatatttgtttttgcatatatgcccagtagtggtatagatcattaccagtggatcatatggtagttgtatttttaacttttgtttatttttcattttttaaaatggggtcttgctgtgttattcaggctggtctcagactcctgggctcaagcagtcctgcacctcagcctcctgagtagctgggactacaggcacacaccaccgtgcctggctatagttttagatttttgaggaacattcatactgttttccatatggctatactaattagcattcctaccagccatatataagagttcccccttttccatgttctcagcagcattttttattttttatctttggtaatagccatcctaactgaggtgaaattatatctcattgtggttttgatttgcatttccctgattagtgatgttgagcattttttcatatacttggccatttgtatgtctccttttgagggatgtctattcaccttatttacccattttaaaatcagattttttatttttattttttttgctattgagttccttttatattctggatattaatccctttcagatgaatagtttgcaaatattttatcccactctactagttgtctcttcattctgttgtttcctttgctgtgcagaagttttttagtttaatataatccctttgtttatttgtgcttttgttaccttgattttcaggtattcataaaatccttgcccagaccaatatccagaagcatttcccctatgttttcttctgtagtttcatagtttttgctcttacatttaagctttcaaaccattttgagttgattatcctgagagcatagattcaaattgccctaaaaatacattcccaatttttgtttttgctttttaattattttttagagacatagtctcaccacattgcccagcttggtcctgaactcctggactcaagtgagccacaactcagccttctgagtagctaagattacaggtatgagccagcatacttggtgttttgagttgatttttgtgtatggtgagagatgagtctactttcattcttctgcatatgaatatccagtgtcccagcaccatttattgaagagactgtccttttcccagtgaatgttctttgtgcctttgttagaaatcagttggctgtaaatgggatttattcctgggctctctgttttgttccattggtttgtgtggtttttaaaaaatacctgaaccatgctgttttggttaccatcactttgtagtatatttcaaggtcaggtagtgtgatgactcccattttgttctttttgcttaggattgctttggatattcagtatcttctgtgatatcatgaattttaggattactatttctatttctgtgaaaaatgtcattggtattttgttaagagtgcattgaatctgtagatcacttgaggtagtatgttcattttttttcataagctatctcttacaggaaagtatgttcatttttatagtaaccattctaatccatgaccatgggatgtttttccttttttatgtgtgtcctctttgatttacttcatcagtgttatatagttttccatgtattcttattttatttttgttgaagtattgtaaatgggatggctttcttgatttctttttcagctaattcattgttggtgtatagaaatgctgctgatttttgcatgttgattttatatcctgcaagttcagtgaatttatcagtcctaagatttttttggtgccacttttggagtttagggttttctatatatttgatcctgtcatgtgcatacagggataatttgacttcatgcttcctgatctgcatgccctttatttctttgtcttgcctgattactctgtctcagaccttttgtactttgttaaaaggtgtgaaagtgggcatacttgttttgtttcagattatagagagaaagctttcagcactttcccattatgcatgatgttagctgtgggtatgttacttattacctttattatgttgaggtacgttctttctattattattataattttttttaattttttttttgagatggagtctcgctctgtcgcccagctggagtgcagtggcatgatctcagctcactgcaagctccgccttctgggttcacaccattctcctgcctcagcctcccaagtagctggaactacaggtgcccaccaccatgcctggctaattttttgtatttttagtagagatgggttttcaccatgttagccaggatgatcttgatctcctgacctcgtgatccgcccgcctcggcctcccaaagtgctgggattacaggtgtaagccaccgcggccggcccattctttctattattatgtgtaatttgttaagagttttcatcatgaggggatattgaatgttaccagaggctttttctccacctatggagataatcacattttttgttcttcattctgttgatttatcatgtttattgttttgtgtatgttgaacccattcttgcatccctagaatgaattccacttggtcatggtaaacaatctttttgatgtacttttggatttggttggctagtattttgttgaggagttttgcatttatgttcatcaggaatattggcctgtagttttcttttgcatgtgtgtgtccttatctggtgcttgtgtcatggtaatgctggcttgtggagtgagtttagaataattccctcctcttcattattctgggaaagtttgagaagaattcatatttaattcccctaaaatgtttggtagaattcagcagtgaagccatgagatcatggactttcctttgatgggtgactttttattactgcttaaatcttgttactcagaattggtcaattgaaattttctgtttcttctaggttcaatcctgatgggttgtatgtgtctaggaatttattttctgtaggttttccaactttttggtttgtagttgttcataatagtctctaatgactctgtatttttgtggtatcagttgcagtgtcatttttgtatgtgtttgattttgagtcttttctcttggttagtctaatggtttcttttcaaaaaatgaacttttcattttgttgatcctttgaatttttttttaagtctcagttttatttattactcttctgatctttattaattctttccttgtaattttgggtctgatgtgttcttttctagttccttgagaagcattgttagatttttcttttttctttttttctttttttaagagacagggtcttactgtgttacgtaggctggagtgtaatggtacaatcaactcaaactcctgggctcaagtgatcctcacacctcagttttgaattcttgggctcaagcagttctcccacctctgcctccagaatagctaggactactggtatgcgctatcatgaccagctaatcttttttttttttttttttttttttttttttttttttttagagataaggtcttgctatatatatggcccaggctggtcttgacccagcatcaagtcgtcctcctgccttgcgctcccaaagcactgggattacaggtgtgagccaccatgcccagccagatctttcttgtttttgatgtaggtgtttattactaaatacttccctcttaaaactgctcttgctgcatcccatacatttttatatgttgtgtttctgttttcactcattttaagacatttaaattttgtttcttaatttcttcattacccattggtcattcagaatcatgttatttaatttccatttatttgtgctgctttaaaagttcctcttgttattgatttctaggtttatttcattgtggtcagaaaggtacttgatgtgattttaattcttttaatttttgtgatttgttttgtggtttaacatgtggcctctccttgaaaatattgcatgtgcttatgaaaaaaaatatgtattctgtagctgttggatgaaaagatctgttagtgtcttttaagtccatttggtctaaagtcagtttaaacttggtgtttctttgttgattttctatgtatatgatctgtccattgctgaaagtagggtgttgaagtccacaagtattattgtattattgtattgtcttcccctttagatctaataatatttgccttacatatctgggtgctctgatattgggtgcatatatatttacaatttttgtatcctcttcctgatttcatccctactgtgtttgatacaaagtctcttatcgtaagtatagctactccttatatagtcatgattgtggtaaaaaaaaaaaaaaaagaaaagaaaaaagaaaaaaaatgtatagctactcctgcttgcttttggtttccatttgcatggaatatattctattccttcgctttcagtctgtgtcttttttttttttttttttttccagacatagtctcgctctgtcacccaggctggagtgcagtggtgctatcttggctcactgcaacctctgactcctgggtttaagcatttctcctgcctcaccctcccgagtagctgggactacaggtgtgcgccaccacacccggctaatttttgtatttttagtagagatggggtttcactatgttggccaggctggtctcgaactgacctcaggtgatccacccgcctcagcctcccaaagtgctgggattacaggtgtgagtcactgcgcctggccatatttgtgtctttagaggtgaagtgagtttcttataggtagcatatagttgggtcattttaaaaacccatttagtatatatcttttaaggtaggaatttaatctgtttacctcaaggttattatttttaagtgaagactcctttcattttgtggttttcagaatgttttgtatatcctttgttcttttcttcatctcttattttttatcattgtattttggtggttttctgtagtgataagatttgattttttttttctcttttttctttgcctatctgctctaccagtgagtcttatacttttatgtggttacataatggtgattattgtcttcttatttcccgatatagcattcccttgatcatttcttgaaaggctggtgtagtggtgataaattcccttaatttttgcttgcctgagacacactttatttctacctaatttttctctttcttttttttttttaagtggagtttcactctcttgcccatgctggagtgcagtggcatgatcttggctcactgcagcctccacctcccaggttcaagcgattctcctgtctcagcctctggagcagctgggattacaggcgcatgccaccatgcctggttaatttttgtatttttgtagagatggggtttcaccatgttggccaggctggtcttgaactcctgacctcaagtaattcgcctgcctcagcatcctaaaatactgggattataggcatgagccactgtggctggctatttctacctaatttctgatggattggtttgctgtgcatagtatttttgaccgatattttttcttttctttcagaaatttggatatatcatcccattttttcctggcctgtgaggtttctgctgttattctaatgaagattcccttatatatgacttgatgcttttctactggtacttttggatttttctctttgtctttgacttttgtcagttcaaatataatgtgccttggaggtgacctttttggggatctttgagcttcctggatctgaatgtccatatctctcgcaagacttgggaggtttttagctattatttcattgtctttttcgttttcttttatttttaatcttgctgtgatctccttagcagctataatttcattaaatatgttttatttttttaatttttttttttttgagacagagtctcgcactgtcgcccgggctggagtgcaatgacgcagtcttggcttactgcaccctccgcctcctgggttcatgcgattctctggcctcagcctcccaaatagctgggattacaggtgcacaccaccacacccagctaatttttcgtacttttagtagagacggggtttcgccatgttggccagactggtcttgaactcctaacctcatgatccacctgccttggcctcccaaagtgctgggattacaggcgtgagccaccacgcctggcctgttttatttaaaaagttgtattaaatatatatttttttctttttttcttttttttttgagacggcattttcacccttcttgcccaggctggagtgcaacggtgcaatcttggttcactgcaacctctgcctctcaggttcaagtgattctcctgcctcagcctcccgagtagctgggattacaggcacccaccaccatgcctggctaattttttgtatttttggtagagacggggtttcgccatgttgcccaagctggtctcaaattcctgacctcaggtgatccacccacctcagcctcccaaagtgctaggattacaggtgtgagccaccgcacccgacctgttaaatatattttctatgccttttgtcatctctttgccttctggaactctaaaaatatgaaatttttttcccttgatgttatctaataagtctggtaggctttcttcactccttgtcattcttatttattcttctctcactggtaattccaaacaaactctttatctttctttgcttgagtaagtttgctattgatgctctctattgtaccttatattttatacattaaattcttcagctgcaggattcctgtttggtgattttaaaatatttctttcttaaatttctctttcatgttatgaattgtttttctgattttattgaattatctttctgtattatcttgtatcctattgagggttttttgtttgtttgtttgtttgtgagacagagtgtcactctgtcacctaggctggagtgcagtggcgtgatcttggctcacaacaatctttgccttccaagttcaagtgattctcctgcctcagcctcccaagtagctgggactacaggtgtgcaccaccacacccagttaatttttgtatttttagtagagacagggtttcaccatgttggccaggcgggtcttgaactcctgacctcaagtgactcgcccaccttggtgtcctaaagtgctggaattacaggtgtgagtcactgcacctggccttgttgagtttttaaaagatcattattttgaattacttttttggtaattggtagatttccttctagcttgttaacggaaagttattgtgttcctttcatggtgacacatttccttgccttttcatgtttctattgtccctgcattgatgtctgtgcatctggtgaaacaatggcgtcttcccatttttctacagtcactttcatagaggctttcacctgcacttggtccttagtgtgctagttgagaagggtgtagtaactctgtttccagataagtgaaatggtatagtctttgttcagctttatcaacagtatttaatgttggcagtaactttgttttcctcagtggcctaggttgtaaaagtttgtagcagtaatggcataggttgttaatggcaagggcttttttggagtcctcctattttcatttgccccacaatgaagttacttagccatgaagatacttcttgctgtcaagtatgatatggcctataggcaggtacagtggctctgggttccaggtgcaggtgctcagggcagctgtgggtctggggttctaggctcagcatctgatgaacctattgtggcacctgggttttgagctatagatttgctccatgtggtagaattggaggtaggtttaccacagagccaagatctgtaactctgatgtactccctagcagcttgggcccaaagggccaggttgtagctttttgtttctgggcggccaggcacagcacaggcccaactctagggaagaagtggtgctttggagtattgggccaaggaaacagaatacagctgcagtttggtaacctgaaccattcaggctcattggcaacttgggtttctggcatagcacagtttttgtttgggccttgggcaatagggagcagcccagtgatgactcagctccccagggagaaagctgtctcagcagcccatacttcagggtgttagtcctgccccctggcagctggttatccagctagctccctaaagtgagtactagagttgtttggcctgtagtgtggggtgtctcatctcatgccctgctttgtttccctggaatgtgaaggcccatgccagctcagcccagtattgcatagctactcagttcaggcaaggcactgcatccccagagggtaatgtgcctcgtcagctcaggtctagggtgtgtgaccttaggttggcccaggcaccattttcctgggatgcaggaagctgcttcagattaggtactggactgtgtgtctgcttgggatggccaagacactgttacctggaaggcagggtggtaggtagggtgctgcttaaacttaggcactggggaggcatgactgctctcgatggccaaagtactgttttcccaggagacaaggtactgcttcagctcaggtacagaggggtgtgactgctctggatggttaatgcactgttttcccaggatgcctggcattgcttcagctctggcctagaggggcaggatgtagcagcatctgggaggggtaggtggaggagcttcgccaaggcatcctttcctcaggaggcaatgtgcagcttcagctcaggtccctggaagcagggcagttttgggagaagtagactgagaggtagacagtgagaggtggatgttgcacatctgccagagcattgttttcccaggagggagtgcacagcttcagctctagtcgaaggtgacaggacacagcctagcatagggacttgaggggtaggtggtgcagctctcccactgcatggccctacatgggaaggtggaaaagctgcttgtagatgttgggccaccaggtgggggtggatggtgatggcttatcctcagggatgaagaggtgccatggaaccagacagaactccagccgttccaaaataacagcacagtagctgtatgggccactgggggcaggacagtgtcagctccttcctcaggagcacagctgtatggactccaggcgggtccgtcagctaagcttagtgcctgtgagggctgtaggggaccccagtggtgagtactgtaggtgtccaaggtggtgatgtacgctgctggtatgctattgctcactttttccacatacggagaaattccttctggttttcagctgatcttggctgggggatggggttgtggagaccaggtgttccattctctgcttggctatcctgagtttctgtgctcaccagagtttttgttattactttgacatattctggtgctttcctttagttatttgcattaaaatgtatttgcttatttattttggctctgtgggggtggggagaacagcatttacggactgctaatctgccttcttgctgaagtcactctcttgctacagatatttggttggaaacattttcgtttgtattctgtaaataactaggagtagaattgctgtgtcatatgatatgtgtatatttacctgtataggaaactgccaagttgttttccaaaatggctgtaccattttgatttctcaccagtattttgtgggagctccagtcctacatctttttgagcacttggttttgttacactttaagtttttcaatttaacagatgtgtagaggtgtctcattgtggatttaaatttcattgctgaaatgactactggtattgagcattttttcatatgttcattgttcatatatctttagttatctttccaaatcttttttttttttttcttgagacggagtttcgttcttgttgcccaggctggagtgcaatggtgagatctcagctcaccacaacctccgtctcccaggttcaagcagttctcctgcctcagcctcccaagtagctgggattacaggcccccaccacaacgcccagctaatttttttattttttgtagagatggggtttcaccatgttggccaggctggtcttgaactcctgacctcaggtgatccgcccacctcagcctcccaaagtgctgggattacaggcgtgagccactgcaccagaccctatctgtccaaatcttttgtcccactttaaattgttttttcttcttaacattgaattttaagaattcattgtatcttttaatattctgaatgctagttatttgtcagatacatgttttgcaaaccatttatctgtatttggtttctttttgttatcttagcagtgtatcctgaagaatagttttaaattttgatgtaatccaaaatatttcggttgtttgtgttctttgttatcctatttttgttgttgttgttttatagatatgggggtctcactacgttgcccaggctggtcttgatctcctgaactcaagtgatcctcccacctcagcctcccatccttgtctacctaattaggctttgtgtaactcagtgttgcaaagctttgacatctgtttgagttaatgtttatatatgttgttacttaagggtttcacattaaatttaaacatacttatattttataaccaaacaagtcatgttggggcatactcattaggattgagtgctttcttacaccaaaatacatgtatacaaagatttaaaacactttcggccgggcgcggtaatcccagcactttgggaggccgaggcgggtggatcacaaggctaggagatcaagaccatctggctaacacggtgaaaccctgtcgctactaaaaaaatacaaaaaattagccagacgtggtggcaggcgcctgtagtcccagctactcgggaggctgagacaggagaatggcatgaacccgggaggcagagcttgcagtgagccgagatcaccccactgcactccagcctgggcgacagagtgaaggctatgtctcaagaaaaaaaaaaaaaaacttttataataacaactgtaaatagttcaattgacagtcatttgtaagatgtttaagtaaactgtgaaacagtaagtaaatggatgaaaacacactgattaaaactgctgcttttatccaacaagatggatgaatttcccaggaaagaatacttgagttcaggcctgttcaagtcccaacctgtttgtggtttgaggttgctctctgcctcgtagagcaaagtggaaaatttatcttctgggaggacagagttttcttctctgaaaaagtttcctacatagttggctttggcatttgcaaggaatgaaaggtcagggattgaggcctcatgagtctggatttctagctgaggttgagagaaaaggtagtgattgtaaccagaaaatccagagtgggtgtatttacctccagaactcatcacttaaaaaaaaattttttttgaactgacatgcttgaggctttttcttttttttttttttgagatggggtcttgctctatcccccaggctggagtgcagttgtgcagtcatagctcactgtagccttatcctcctggcctaagcagtcctcctgcctcaacctccctagtagctgagaccacaggcgcatgccacctgtgagtttctagagatgaggtctccctatgttccccagcctggtcttgaactcctgggctcaagtgatcctcctgcctcagccttccaaagtgttggattacaggcgtgagccactgtgcctggccagagctcatcactgttaactcagcctgggtttttcacagcagtcatggaaatagattcattaataatagtaacaaatatatagtctccctctcaaagaaaccttgagtggcagtggcataccagatacacagtaggaaatactgtagaattatgttgttaagttcataaccaaacatcatacatgatgataaaagacaagataatggtcacatttatgcagtattaactgagagggcaaatttgtgcctgagaagctattgggaatgttctctctctttgcattactaggaattacatgggaaacacatgtagacagtcttcaggctattaagatttgtccacttaatctttacttatacatgaataaaaaatgggaaaacatgataaatataataaactaatacactcaaccctgccccttgattatataatagaacaaaatcagcatgcccggcatgagcctgccagattgccaattccatcctccaccttcagaggatgccgccatccagaattttgccttactcattttactttcttcatagttcgacaccttaaatgtatattactaatagtagctttgcatttttggctgatttaaaaattgatataaatgaaataatgctgtagagatgctttttggtattaagtggatatactgttattcttaaagatgtttgaaatgaatatacctttctaaatatctttttaaaataatacattaaatgatactgctttagaattcatgaactgcatctcatgagaatatgtagagatgacgtgggcaggtaaagtaaaacttcaggttgaatatcctatgataatttaaaaatgacaaaatagtgtggtgaataatagagcttgagcactttaaggcaccgtagggaccccttcaatgtaatgatgacagtgctgaggtgcagagaagttaggtaatcagcccaagccactactctaaggacagaccctatctacttttcctaatttgtcagaagactgcctatgatactactaataaaaagtcctatgaaattggtattgtcattattttacaaataaaataatcttcaatttttgtttcctctatgcatgggttacttagtattttgtaatttgaatttcaagcataattaaaaagaaatcaggtatctaggctgggcatgatggctcaagcctgtaatctcaacattttgggaggctgaggcaagaggatcacttgaggccaggagtttgaggtatcttttgttgatctctacactgattgtattctctcttttattctatgaaagttaaagattttttctgatactacatattgtcagttttttaaatactcagtttgtgctaaaagaaaacattcggcaactgatatctgctgttctgtatgtatctgtcagtccagatttgtccattatggtgtatgaatctaatagaacctcaccaatgttatacctgccttcttgaaatcattactgagatagctaatattaaaatatcctggtttgtctgtatatttaattctttactctcattatactaaatttttttaatgtaatttgaattgatggtaaaaattgtatacaggccgggtgcagtggctcactcctataatcccagcattttggaagtcctatgcaggaggattgccagaggccaggaatttgagatcagcctgggcaacatagtgaaactctcatctttataaaaagtaatattaaaatttttaaaagtgtataaactgtaaagtatattttactggtgttttcttccttattcctacttgtcagatgcaaatacacatttttgtgtgtttgtgtttagtaattataagtatacatatttcattcttctatttcatatatttctatgacattatatcttagatgtgtaatttatgaactactactggattattttaatccattagaaattactattcacgcattctgtattcaattcatgtgatagctaatatatttggttttaaatgcatcttattttgtggttttcttctaggctgttttttgtgctttcttttaaaaatatataggttttaataatcttaattttcttttagtttgaaatgtatatactcattttattcattagtctaagataagaattgtaacacttctctaacctattatagaattgttaatacctttacccttctcttgaacacatcaaaggatgtcattgagtgttggtattggagtatagcatatctattattctgctcaattagaagatattgttcatgttgtatagagataataagtaattgtattgatctgcagatgcatccatctcttggattctcattccttctaccactgcagaactttcacctgtaatcactttcctttggccttaaggataacttttagggttacttttctactaaatttccaatttttgaccagatataatcttatattgtgctcttcctgaaaaatactattgttgtggatagaaatctgggttggtagttatttcttcagcaatttgaccatgtcattccactgtgtccctggcctcctgtatactggatgtgaatggatacaattatatattgtgtttatagttttcctgtgctataggaacagtattcgaatctgatgcaaaggacaacacaccctagagattgtaacagtgagatgaaccaagtgattggatggggttttgagttgctggaataatggagttacagtgtacaatgcataagcaacataataaattatatatctggtgaacaaatggatggattgtgccatgaactggttagatgcttacccacatgtcacagaaggtcttcacttgcaaggagggtgggaaatacctcttggtcagctctcaacttgtgcagcatcaggcctctttcaatggggaagagccacacaggagcaatgagagtggggaggcttttcacactggacaaagggattccaagtacagcaattgtgggaaagccttttgctgcaaatacatactttttcagtatcagaaaatccatgctggagtaaacccttatgagtgcagtcagtgctggcatacctttaataacagctactattctatagttacccaagagaattcacagcaaagctgtgccttatgagtgcagtgattatgggaaattatttggctccagctctaatctccatatacaccaaatagttcacacaggatcaaggctttaagagtgtgttggccaggcatggtggttcacacctgtaatcccagcactttgggaggctgaggcaggcggaccgcaaggtcaggagttcgagaccagcctggccaacatagtgaaaccccgtctctagtaaaaaaatacaaaaattagctgggcgtggtggtgcgcgcctttagtcccacctactcgggaggctgaggcaggagaattgcttgaacctgggaggcagaggttgcagtgagccgagatcacgccactgctctccagcctgggcaacagagcgagactctgtctcaaagaaaaaaaaaaaaagtgctgaatgtgagaaagcctctatcactagacctcatcctgtttagcaccagagaattcatagtggagaagaccttatgagtgcagatcatgtggcaaattctttataaagacacatttgttgagtaccagaaagtccacaatggaaaaatatcttctcagtgtggtgaacgtgagacattctaaagccacaattcttaccgtggttaggctttgtgtccccacccaaatctcatcttgaattgtaatccccataatccccagtgaccagggtaggacctggtgggtggtgattagatcatgggggcagtttcccccatgctcttctcctatagtgagttctcacaagatctaaggggttttttgtttgtttgtttgaaacggaatcttgctctgttggccaggctggagtgcagtggcatgatcttggctcactgcaacctccgcctcctgagttcaagtgactctcctgcctcagcctcccaagtagctgggactacaggtgtgcgccaccaggctcagctaatttttgaatttttagtagagacggggtttcgccatgttggccaggctggtctcgaactcttgacctcaggtgatccacccatctcagcctcccaaagtgctagcattacaggcatgagccaccgagcccagccctcaatctgatggttttataaggggctctttcctgttcgctcgttcgctctctctcacctgcctccacgtaagacgtgtctttgcttctctcttgccttctgccatgattttaagtttcctgaggcctcccgagctatgcagaactgtaagtcaattaaacctctttcctttataaattacccagactcaggtatgtctttatagcagtgtgagaatggagtaatggactatcttgtaacatgttagagaattcacaatggaacaagatcttgtgtgttcaggaaatgtgggaaagcagaaattcccacattgcttggcaaatgaaagtcaaccagagaaaggccttttgtagcagatataagaaagcatacagtgaaggcctaacctcattaggcatcagaaaatttacactggagagaggccttaagagttcatggaatgtgctcattgtttaacatggcatgatcctaagagaaaatctctgagagtaacctttgagagggagctctaagccaggatttgaacctcagacatatgtgtattcacactgtggagattacctacaactgcatgagtgatcagaaacaaatggggtcctcatctatttccccttagtggtttcagcgtggatattatccagctgcagcctaaaagatctgagctggggcctgctgtggatttcaagaggtccccatccttaataaacagtgttgaccccacatggtagctgagatggatttctccaaccagcttcccaatccaccaaccttagatatgcccacctcatgatgttctcatttgtgcagagataaatgccatagtgtttaacccttcaatctgttctgttcattgtgtgggactgattgagaaaagaagggctttgctagcagggaccaccaactttatgtgcctcagagtggacagcaggatggtagagagtagctctaagtctagtttggcctgttttgcaatgctacgcaacgtctcttagggaaaactgtagggcattgtgagactgatcttgtgacctggatgtcaggatctctgtgagccctaagctcaccctcatgagggagtagttggtgtgacaacctccagtgcttctagaaacagcataagttgagtccctttttcccagaggatgtgtcatattccatcaattctgttgaggggtggctgtctcctaggacctctatgcagaggacattgcccctgaaatctaaaatctggtaggcatgtaagacctacaggggctaagcaggaaacagatacagaaacactacatacagaaacattggatagtagggagtagtggagactgggaaactagaagttatgtgtgtactctaaagggggatacacaaatttaatgtaactatgactctgcgatgagggtgtacaaaaattctcacgaccggctgagctccttttctcctatggctgaggccggtgtgagagcaaacaatctgaaagtttgtgaattcctgtacctccctgggctgttgacattttggtcatcactgaacaggcaggaaccccaggactgacaaaagagagcttggagtcgatcgtgcatcttttgtgacccagtcagcatgtgggaagtgatggccttcattgctttctagtttttgctgccactgaaggagggctgactcaagatatgggaagagggagagagttgaataaatacaggattgattgattcagatttttatgtggaaacttttttttcttaacacatcaatgatatataattggcatacaataaactagacatattgaaattgtataatttgataaatttcgacatgtatacacatgtcaaaagtttcctcatgccccttactaatctcctcttattctccaatactttatccccatgtgaccattgatttgtttaatgacactatacattagttagtattttctgaaattttatataaatgtaatcatatggtatgtgtttattttttatctgtctttcagtaaactgtttctttttagatttggggggtacaagtgcagttttgttatagggatatattatgtattggtgaagtctgggcttttagtgtgactgtcacccaaatagttcacattgtacccaatagacaatttctcatttttcaccttttttcccttgttttgtgggtttattttcaacttttattttaagctcagggggtccatgtgcaggcttgttacaggggtaaattgcatatcactggggtttgatgtacaaatgattttgtcacccaggtagtgagcatagcacccaacagaaagtttttttgttttttgtgtttcccttacccttctcccacactctcccatcaagtaggccctggtagctatttttcccatctttgtgtttatgtgttctcattgtttacctcccacttataagtgagaagatgcagcatttggttttctgttcctgcattaattcatttctgataatagcctccagctccatccatgctgctgcaaaggacatgatgttttttatggttgcatagtaatccatggtgtatacataccactttctttattcatttcactgttgatgggcatctaggttgattcatgtctttgctattgtggatagtgctgcaatgaacatacaggtgcatgtgtctttttggtagaacgatttctattcctttgggtacataaccagtaatgggattgctgggtcaaatggaaggtctgttttaagttctttgaaaaacatccaaactgccttcctgaatagctgcactaatttactttcccagcagcagtgtataagcattcccttctctccacaaccttgccaatatctgttactttttgactttaaaacaaccattctgactgatgtgagatggcatctcattgtggtttgatttacatttctctaatcattagtgatgttgaaccttttttttcatatgcttgttggccacatgtatgtcttcttttgagaaatgtctgtttatgtccttggctcaattttttaaatgagattggttgttgttttgtttgttactttgcttaagttccttatagattctggatattagaccttgtcagatgcacaggttgtgaatattttctcctattctgtatgctgtctgtttactctgttggtggtttctttctctgtacacttcagtttaattaggtcccatctgtctatttttcctttgtttcaattgcttttagagactttgtcatgaaacctttgccaaggcctgtgtccagaatgatattttgtaggtttcttctaaggttttttatagatttaggtcatacatttaagtctttaatccattttgaactgatttttgtatatgatgaaaggaaggggtccagtttcagtcttctgcctatggctaacctgttatcccagcatcatttattgaaggagagtcctttccctattgcttgttattgcttactttgtcaaagatcagatgtttggagatatgtggctttatttctgggttctttattctgttctagttgtctatatgtctgtttttgtatcaatatcatgctgttttggtcactgtagcctttaagtatagtttgaagttgggtactgtgatgcctccagctttgttctttttgcttaggattgctttggctatttggactgttttttggttccatgtgatttttagaatattttttctgattctgtgaaaaatgaaattggcagattgatgaaatagcactgaatccataaattgctttgggcagtatggctattttaacaatattgattctttttatccatgagcatgaaatgtttttccatttgttttggtcatctctgatttctttcagcagtgttttgtaattcttgttgtagagatctttccactccctggctagctttattactaggtattttattctttttcttgactattgtgtatgagattgcattcttgatttggctctcagactggacattcactgtatattattggtacatagaaatgctgatttttgtacattgattttatatactaaagctttactgaagttatcagttctaggagcttttgtgcagagactatggggttttctaagtatagaatcatatcctctgcaaagagagatagtttgacttcctctcttcctatttggatgccttttatttcattctcttgcctgattactctggctaggacttccagtactatcttgaataggagtggtaagagtgagtatcgttgtcttgttctgattcccaaggaaaatgcttccggcttttgcctgtctggtataattttagctgtgagtttgttatagatggcttttgttgttgctttgagacaaggttcttgctctgtcacccaggctggagtgcagtgatgcaatcacagctcactgcaacctctgccctcctgagctcaagtgcctcccacctcagcctctcgagcagctgagactacaggtgtatgccatcacacctggctaatttttgtgtattttgtaggaacggggttttgctatgttgcccaggcttgtctccacctcccaaagtgctgggattataggtgtgagacactgcacctggcccatagatggctcttattattttgaggtctgtttcttcaatgcctagtttgtggagggttggaagggttgttaaattttattgaaagccttctgtgcatctattgagataaccatgtggtttttgtttttttgttctgtttatgtgatgaatcacatttcttaatttgcatatgttgagccaactttgcatgccagatataaagcctgcttgagtgtggtgatcgtggtggattagctttctgatatgctgttggattcagttaactagtattttgttgagaattttgcatttatgtttatcagggatattggcctaacattttcttttttcattttgcctctgccaggttttggtatcaggatgactctggcctcacagaataagttagggagtagtcccgcctccttgattttttgggaataatttcagtaggattagtaccacgtctttttacatctggtagaatacaactgtgaatccacctggtccagggctttttctggttggtagctttttaattactgattcaatttcagaactcattactggtctgttcaggatttcaatttcttcctggttcaatcttaggaggttgtatgtttcaaggaatgtatccatttcttctaggttttttagtttgtgtgctaagtttttagttcttaatagtctctgagagaattttgtacttctgtggggtaggtggtaatgtcacctttaacatttctgattgcgtttttttgcatcttcttttttccttattaatctagctagtgggctaccagtgttgtttattcttttgaaaaaccaacttacggttttatgatctttgtgtagattttcacatctcagttttattcagttcaactctgatattggttatttttctctgctgcttttctttcttttggggttgttttttttttcttttagttcctctaggtgtgatgttattttgttaacttgagatttatctaacttcttggtgtaggcattttgcactataaactttcaacactgctttagctgtgtcccaaagattctggtatgttgtatctctgttttaattagtttcaaggaatttttttatttgtcttgatttcattctttacctaaaacacattcaggagaagattgtttaatttccatgtaattgtatggttttgagagttcttctaggtattgatttctgtttctactgtgctatggtctgagagtgtggttggtatgactttttttttaattgttgagtattgctttatggccaagtatgtgattgatcttagaatatgtgacatgtgcagatgaaaagaatgtatgttctgtggttgttgggtagagtattctgtagatttctgtaaggtctatttggtcaaatgtccagtttagcttccaaatacctttgttagctttctgccttggtgatgcatctaacactgtcagtggggtgttgaagtctcctgctattattgtctggttgtctaagtcttgttgtaggtctctaagaacttgtttcatgaatatgggtgctccagtgtttggtgcatatatatttgggatagttaagtcttgttgaattgaatcctttatcactatgtgatgcccttctttgccttttttgatcattgttggtctaaagtctgtttcgtgtgaaatagcaatccctgctcttttttttcccatttgcttgatctttctccatccttttactttgtgcctatgggtgtcattgcatgtgagatgtgtctaatgaagagaatacacagttgggtttcatttctttttccaacttgccaccttgtgccttctaagtggggcatttagcctatttacattcaaggtcaatattgataagtgaggatttgatcctgtcattatgttgttagctggttgttatgtggactttattgtatagttggtttgtagtatcaacaggatatgtgctcaagttgtttctgtggtggcagatactcatcttttgcttctaggtttagcactgttttaaggacttcttgtaaggcaggtctggtagtaatgaattcccttaacatttgtttgtctgaaaaagattttatttatccttcacttaatgaagtttagtttggttggatattaaattcttggttcaaatttctttcatttaaaaatgctgaatataggcccccagtctcttccagcttgtaaactttctgaaaggtccacggttagcctgatcgggttccttttgtgggtaacctgccacttctctctagctgcctttaatgtttttcttttgtattgaccttggagaatctgatgactatgtgtcttagggatggtcatcttgtataatatcatctcacaggggttctctgaatgtcctgaatttgcatgtcaacctctctagtgtggttggggaaatgttcatggacagtatcatcaaatatgttttccaagttccttgttgtctctccatctctttctggaatgccaatgtgttataggcttggtctttttacatatcccatatttcttgtaggttttattcattttttaaaattcttttttctttatttttttctgctgtattggttcaaaggagtcgtgtttgagctctgagattattttctttttttttgtgggatagcaaacacttatttgaagaacttttaggataaaatttagtttacctctgataaagctgaagaaaaatgattgcagtttttatgcattaaatgataaacattgcctttgtattcttttcccagttcttctacaattttttctatatcatcttctaggaagtccgtgctccctaaaacaacttctttaaatttaaatggttctcctagttcagaagcatttcctggggaaatttcaaatattccagaaaaggggtaaggatggccaccataagcaaattctctgccatagacttcaatttctgaatgaaaaactccaattccaatggatgaggtatattccttcatccaatacatgtcacacacgttgagcaccactaactggttagcccccatcctcctccccgcggccgccgcctagtcctcaagccgctcggtctccgcggggccggaggccgctcccacccccgcgggcgcttcaaggggcctgagccgggcactaagcgtacagccctgcccgtggcagccggggcagaagcatcgggcagccaagccactcccgggcgccaacgacaggagcctctgtgcggacagggccggacagctggcggcccgctccggatgaggcacctcccctaggcggcagacacatggggaaaaactgagctctgagactattttctaagcttggtctattctgttgttagcgcttccagttacattatgaaattgcaattgctgtagttaatttcttatttccagaagttcagtttgatgactctttttcttttctttcttttttttctttctttttttttttttttttttttttttgagacggagtcttgctctgttgcacaggctggagtgcaatggcatgatcttggctcactgcaacctccatctcctggatccaagggactcttgtgcctcagcctcccgagtagctgggattacaggtgcctgccagcacacccagctaatttctgtatttatagtagagatagggtttcaccatgttggtcaggctggtttcgaactcctgacctcaagtgatccacccgcatcagcctcccaaagtgctgggattacagacgtgagccaccgtgcccagcccattttggttctttgttaatatggtaatattatatttaaactcttggattgcattattggtttccttggatttttccttccttgccatccagactctgaattctaagtcatttcagccatttaagcatggttccaaaccatcactagggagctagtgcagtcgtttggagacctttagagttgccagaaatcttgcactggttctttctcatatgtgtgggctgatgttccttgaatctttgaagttgctctcctttggatggggctttctgcttttatattatttgatgcccttgggagttttactgtggtataagttgggtttagtttcatggtttcaattatgggtgctttcacaggccaaggctcagctgagcactcctgagctgcatgctgtaaacctgggtagaggggattaagcccttggctttgttctctggctgcttggggtgaagcacctgctgtgctagaggggctgaggtgttctcagtctgctggcaaaagtgctccagcagagcattgtggggactgcagagagtgcactgtggctgggggatggggaggccacaggcaagtgtgcaccacttgggcagtagaggggggctacctgcaagtgtgtgccaatggggtggcatggctgtggtgtaggtgagtgaagcaccatggtgtgaggggtccccggcaatgcctcccacctttttgaatctccagtgtctattattccactatttccatatgtatacatcatttagctaccacttataagtgataacatgcagtatttgactttgtttctgaattatttcacttaagagaatggccccccagttccagccatattgctgcaaaagccatgattttttttaatgactgagtagtattccatggagtgtatatatatatacacatatatacatatacatacatatatatacatatatatacatatacatacatatatacatatatacatatacatacatatatatacatatatatacatatacatacatatatatacatatatatacatatacatacatatatatacatatacatacatatatatacatatatatacatatacatacatatatacacatatatatacatatacatacatatatacatatatatacatatacatacatatatacatatatatacatatacatacatatatacatatacatacatatatatacatatatacatatacatacatatatatacatatatatatcgcattttctttatccaatcatctgtcgatggacacttaggttgattctatgactttgctactgtgaatagtgctacagtaagcatgtaagtacaggcatctttttgatatagtggtttattttcctttaagtaaatacccaatagtggaattgccagatcaaatggcagttctattttcagttctttgataaatctccatactgttttccatagaggttgtactaatttacattcccaccaatagcatataagcgttcccttttccttgcatccataccaacatctgttggttttttactttttaataatagccactctgaccagtataagatggcatctcagtgtgtttatgtgtgtgtgttttctctcatcatatctcattataacctcaaattcctgggctcaagcaatcctcttgcttcagcctcccagtgtctaggactacaggtgtacaccatcatgccttgctcttttttttttttttggtagatataacatcttactatattgcccagggtggtctcaaactcctgacctcagcaattattttgtgttggcatcccaaagcactgagattacatatatgagctacctccctaaaataagggaagtgagccagaagctctgggcccagcccatgatctcaatcggggcgaatatccccgcctcctgacctcaattttcctaagctagaaaggacctttcgaccctccgacttgtgcccatagtaaagcggcggccctaagacgacgcgggggtccttgtgcgcacttaaatggagtcggctgcgcttggtgagttcccacacccggtagatgtgagggaaaaactgccttactcagaaggcaccaccccttgcgtcggccgcggactctaggccaatgacgggccaggacacgggcgatttctgcgggccagggcggcggaggtgggacttccgcttcgtcgcgtgacgtcatctccgtgagcaggattggccctggaacagtgtggggcctggaccgctgggtaggcgcgtccagcggcctgagcaggggagggtaatgaggctgttacgcgccttctccgcatcttggcgggagcctgacgccccgcttcttccctaacggggtgttccaccggcgcctgccgaggcctaggcctccgcagccgccctccgtctcctcagccccgacgctgcgcccgctttgtgcgcatttttctctggggaaactgaggctccgagtgcgaaagtcagccgaggtcgccccgcccaggacagagaagggctgggggtcggctgagccgcggcattcccgggccccgctagggctgcagggtctcaggatggcagcctcggcgcaggtgagtggacgaggttttggccttgctgctgctctgctacttctggaggcctcgtgggcaggcagaagccaagacagccacaggatgtttctttgtcgccgtcgtttatttaagagaagtggccgtagcttgtcatttcctttatccgcagtcctgcaatagtgttggcctccgacaggtgctcagtccttggtagaaggatgaatgatgcttccttcatggatctcatcacacttcccttaaatccaacctcctctgttgcctgccagcccctaccccatccacctggccaaccacccctgaccttgtctctccatttttcccttgtcctttgctcttcagagccaccaacctgaccgtgcagtcttcttcctttttccaggctttctctttgcacttccctttgccttgaacactgcccctataacttcgcagggcctccctctcatatctttctggcctctgtccagatgtcacctatttggaggtggctttcttggcaattccggctaaagtggcgccttacgcacttgcccatttttggcaatgtgtggcatttttgtatagagaatctgacgatattaaagaagcttgccgtttgagttggtctaggatgttatgtgaacaaagagaaacgaaataattgcaaagagtgacagctgatcataaagagtccttgctgtgggctgattggcaggcattatttaaccctcagctcctttaatcctgaactccttagaattaggttctcttgtcctcactgttttacacaagagcagctggaggctcacataggttcaattacctgccttacatcactgtagctcttaagtatcagaaactaacaactggtgtgtctaccatcacagcctgtgtttttaccctcttctttgcccgcaatggttagggaggcctgggggtgacacctaaagtaaactttgcaagttgagcaggcttccttctagcaggtggtcttggacatgaggagtcatggcatttcatgctggtggaactgtgtggactaaaaaaaaatggtttattggttgtttaaggagtccgcaggggacccgtgtggcttccacagtggtttcctgagtggttttctcctataccagctgacacatgtcttgggacacaagattttgtggtcttttgctagatgtgccttcctccttagccaggacagacatagccagtcaggggcccatgttctcatggctacaacctgctgtgtcctctgtgactcttgttccttgctcctgaagtatcctgacctcagggatacttgttggtaggactcaaacaggaaaaggtagtgatagctcgttgtggattcttcctatgagaatgggcatctgtgaggcccagaagtgtccgaggcagcagatgcaggtccaggccctgccacttttgaggcaggtgccaccacctcaggtgactcttctgtgaggtaggtgattatgactatgctgctctgcccaggtccatgaaaatatttcaagtggctaaccccagcacagtggcatgtgtctgtatatccagcttgggaggctaaggcaggaggatcatgagttcaagcccaacctgggcaaaatattgagaccctgtctcaaaaaaaaaaaaaaaaatcctgaaaatattttcagggtggctcaaatggatgtatttcaatgtttcccatcctcattaactgtgcattaactttgctaatgaaggagtgtcgggttgcatgattagaacatagaccatagggccctgggttcaaattctgtctctcctgataagagatgtgactttgggtagactagtggaggtcctggacctcaagtctctgagtgtgacatggagatgatgatggtgaactcaggagctgtggccctttgccccagtgtttcctttacagcttttcttcagatcttttgactattcttggtgaagtggaaaaccctgttgtgttgacctggacatcagggctcagataaatgaaatgagatttccaaggtcacatagcaggcttgtgttgatttcaggaatttggttttaaacctcaggagtctgactcctgagctggggacttttagtcactttaccatggcatgtaaagccattagcatgaggcaggctcacagggaggatcggtaagactcaggtgctgttcttgttgttgttgctggtgttgtttttgttattattctttcccattcctctgatgtctcagagcacttactgtcttgcctctcagtccccttaggattgtcctaaccttatttctgtgtgaagtggctttctgcataggaggcttctctctcttcactgctgtaatttttttttttttttttgagacgagtctcgctctgtcacccaggctggagtacagtggcacgatctcggctcactgcaagctccgcctcccgggttcacgccattctcctgcctcagcctcccgagtagctgggaatacaggcgcccgccaccgcgcccggctaatttttttgtatttttagcagagacggggtttcaccatgttagccaggatggtctcgatctcctgacctcgtgatctgcccttcatggccccccaaagtgctgggattacaggcgtgagccaccgcgcctgaccgacactgctgtaatttatccaaggcaatgtccacattcccctcatgcctggcacagatcatggccctctagagatgcttggtgatttgattcttgggtcactgcgcatcttttgcagtgctgaagtgacaagttctagttgtattccacagttccaagggaaacactactatctctgtttaattttccaggtgtctgtgacctttgaggatgtggctgtgacattcacccaggaggagtggggacagttggatgcagcccagagaaccttgtatcaggaggtgatgctggagacctgcggacttctcatgtctctgggtaaggccccttctggtcctgtgctcccttaggattgagttctcctactcatgttcccctctctcctccacagcccacttgttctgaggctcctggcaccacgcaggggtgttcaccattggctctgagcgtagcacttgggagaccagggtctggtgtccaggagtccactcccatctccactgctcatgatccctgtgttcctgggcaagttaaggaatccctctgtgcctcagtttttctcatgaataaaaagggccaggccaggcacagtggctcatgtctgtaatcccagcactttgggaggccgacgcggacaaatcaggaggtcaggagtttgagacaagcctgggcaacatggtgaaatcccgtctctactaaaaatacaaaaaattagccgggtgtgatggcgggtgcctgtaatcccagctactcaggaggctgaggcaggagaatcacttgaacccgggaggcggaagttgcagtgagctgagatctcatcactacactccagcccaggcgacagtgtgagagagactccgtctgaaaaaaaaaaaaaaaaaaggccaatatagtatttgtttcatagggctagtgtgagggcaaatggttcagtagagtgtgttgtgataggtggctgggcgcaggttagcaattgtgacctctgttgctgtcactattgtcactgctgtctaaatcattgtcctcataatcagcagtatcacacttggactccgcagtttttggaacaactttgtatagttttttagttaaattggccagatgcttttgatgactagactcaggtgtacattttggcttggccattcgccatttcccagattttggcaagtcactttatctgcctgagcctcgatctcttcatctataatgtggtcctgattgcagtacattcttaatgtgcatcctgtgaagaaatcctaaaatagaatttttcatgcagggaccataggagtagcaatgtaatgctttgcttagaatgtaaaaaaaaagccttaggtcagtgaagaaacttacctttctcctgaatggagactcagtatctcaaatatgttatttcttttctaaactaatgactaaatttaattgagtgtttataaaatacaatgcatttaaattgcttggcatattccctaggttatagttacattgtataaatatcagttattgacatactattaggagtaaagttctatggccaggtggcatattgattaaggacttggatttgagagccacagcagcaaagtctctccaagaagtgacatttgagctgagacccaaagagtgagttgattagaaggagcaagatagaggagcaagtagtattccaagtaggcaggctggcatgtgcaaaggccctgaggtggtgaagagcatgatcctgacaaagctgaaggaaggtctgattcccctttttcactgcactgtcattgaacccagtgccaagcacatagcaaaaatgagtgaacatttgcttagagatgactgatgaatcccaccctgtgtttttgtgggtcctactgcctgtgccattaacttctccatagagtacttatgtcttttacccccttatattttgaaaagttttgggctatatgtgcagatcagctcatacagtcttaaccctgaaggaaatatattatctcacctaataagcttagtggtaaggctggctcctgggttggtgggtgtcaagccagttgtctttctttgctcccactttcttttttcttttttggagacagggtctcactctgtaacccacactggagtgcagtggtacgatctcagctcactgcagcctcaccttccagtctcaagtgatcctcccacctcagtctcctaagtagctgggaccacgggtgcatgacaccacacccggctactttttgtatttttagtagagatggggtttcaccatttgccctagctggtctcagactcccaaagcgttgggattacaagcgtgagccactgtgcccagcctctttgctccctcttcttggtaaggtttttaggcaggttccctcacagaattcccaggatgctgcatggcagcaggagtggcagcctccctcatttagcccttcctgaaagagaaggttttttctctctttggagtggctggtataggtcacctgcctacctcagagtacagttgatcagggttgccatttgcaagatgatggagaccaggacttttctactgccatggggactaattataaaatcccttcagaaaatttgtcttaacagggttgagatttttgtaggatggagattaaaagtaattggtactatcacacagccagcactactgcttacagtctttggggcccaatgaggatgttttttttctctttttttgagacggagcttcgctcttgtcgcccaggctggagtgcagtggcatgatctcggttcactacaacctccgcctcctgggttcagcctcccgagtagctgggactacaggtacccgccaccacacctggctaactttttgtatttttagtagagatggggtttcaccatgttgggcaggctggtctcgaactcctgacctcaggtgatccacctgccttggcctcccaaagtgctgggattacaggcatgacccactgtgccctgccagatggtgtttttgtggttgttttatggtcacggttcaacgttttctttgcttggctgagaatagcttcacttcatggtcttccccatcctgcagtcccagatcagattgacaggtttctttcttctaacctaactccctgtgtcctcttttgttctccatgcacaggctgtcctttgttcaaaccagagctgatctaccagttggatcacagacaggagctatggatggctacaaaagacctctcccaaagctcctatccaggtaggagccaacagctgggaaggtgggggtcatggcagcttacacatggaaaagtgaacactgcctctgaattttgtgggcaatcttcttattgtggtctctctgggtgcttgggatccatggagcctctccccgcccgcccccccccacccgccttcagacagggtttcactctgtcactcaggctggagtacagtgatgtgatcatagctcactgcagcctcaacctcctgggctcaagggattctcccacctcagcctcccgggtagctgagactacaggcatatgcaccatgcctggctgagtttttaaaattttttatagagatggtcttgttatgttgctgaggctggtctcaaactcctgggttcaagctctcctcctgcctcagtgttcgaaaatgctgagccaccaagcctggcctcttacatcttaaatttaagtacttccaagttaggtcccagatgtatatatttcactaacgcataataaaaaattatggctaacatgtatttatttcttactcagtgccttgctctctgccgacgatagtatatgtagtgtttcacttcatcttcactatagtcttacaaggcagactctatttttggccctttttgtttgtttgtttccgagatggagcctcccactgttgccctggcaggagtgcgatggtgcagtcttggctcactacaacctccgtctcctgggttcaagtgattctcctgcctcagcctcctgagtagctgggattacaggcgtgcaccaccatgcccagctaatttttgtatttttagcacagacggggtttcaccatgttggccaggctggtctcaaactcctgacctcaggtgatctgcctgccttggcctcccaaagtgctgggattacaggtatgaatcactgtccctggcctttgttttttctataatgccatctctaataagcctttttgtgtattgtgttcgttccaggtgacaacacaaaacccaagaccacagagcctaccttttctcacctggccttgcctgaggaagtcttactccaggaacaactgacacaaggagcctcaaagaactcccaattagggcaatccaaggatcaggatgggccatctgaaatgcaagaagtccacttgaaaatagggataggcccccagcgggggaagctgctggagaaaatgagttctgaacgtgatggtttggggtcagatgatggtgtatgtacaaagattacacagaaacaagtttcaacagaaggtgatctctatgaatgtgattcacatggaccagttacagatgccttgattcgcgaagagaaaaattcctataaatgtgaggaatgcgggaaagtgtttaaaaagaatgccctccttgttcagcatgaacggattcacactcaagtgaagccctatgaatgcacagagtgtgggaaaacctttagcaagagcactcatcttcttcagcacctcatcatccacactggggagaagccctataagtgcatggagtgtgggaaggcttttaaccgcaggtcacacctcacacggcaccagcggattcacagtggagagaagccttataagtgcagtgaatgtggaaaggccttcacccaccgctccacttttgtcttgcatcacaggagccacactggagaaaaaccctttgtgtgcaaagagtgtggcaaagcctttcgagataggccaggtttcattcgacactacatcatccacacgggagagaagccctatgagtgcattgagtgtgggaaggccttcaaccgccggtcatacctcacgtggcaccaacagattcacactggagtgaaaccctttgaatgcaacgagtgtggaaaagctttttgcgagagtgcagacctcattcaacactacattatccacactggggagaagccctataagtgcatggagtgtgggaaggcgttcaaccgtaggtcacacctcaagcagcatcaacggattcacactggggagaagccttatgaatgcagtgaatgtggaaaggccttcacccactgctccacttttgtcttgcataaaaggacccacacaggagaaaaaccctatgaatgcaaagaatgtggaaaagcctttagtgatagggcagacctcattcgccacttcagcatccacactggagagaaaccctatgagtgcgtggagtgtggaaaggccttcaaccgcagctcacacctcacgaggcaccaacagattcacactggagagaaaccctatgaatgcatccagtgtgggaaagccttttgccggagcgcaaaccttattcgacactccatcattcacactggagagaagccgtatgaatgcagtgagtgtggaaaggcttttaatcgcggctcatccctcacacatcatcaaaggattcatactgggagaaaccctaccattgtaacagatgtgggaagaccttttatgactgcacagacttcagtcaacatccaggaacttttattagggaaagagtttttgaatatcaccactgaagaaaatctgtggtgaaagggaacatcttaccatctggccattcacactgaagagaaacttcataagcatcctctctttgagaaaacgtgtaatagatgatcatttgtcgtctaaacaatcaagttagaaattgaaccagcctggagtcttattctccacctgagaattcacccatgagagagacccagtggttgctatgcacttaggaaaactttcagccacatctttcttcttagtttacagtgaaatattatctcagggatattttttttttttttttgagacggagtctcgctctgtcgcccaggctggagtgcagtggcgggatctcggctcactgcaagctccgcctcccgggttcacgccattctcctgcctcagcctcccaagtagctgggactacaggcacccgccactacgcctggctaattttttgtatttttagtagagacggggtttcaccgttttagccgggatggtctcgatctcctgacctcgtgatccgcccgcctcagcctcccaaagtgctgggattacaggcgtgagccaccgcgcccggccatctcagggatatttaaacaaaggaagaggaaatatagggaagagaaagaaaccacagcttcttttagacttgtctgacaagcctatggcaattttgtcgtccctttgttattttatgtgggagagggaaatgtttcagaaacgaaagatctcatcccctttatttttctgtgtatgcattcactgctgcccagtgtcagaacagttatacaaacgagggcttgaaaacattttgtgaaaacttgcttagtcctgcaacgttctccactctcgaggtgcagaagcatacatctttataaaaaatatggaggcttgagttatgaaacacttttataaggagataaggatgtacatatgtttggacacattgtccacttcagatgcttgtttaaaaaaatgtttcaccatgtgtctttacccaatacacatactttttcttgatgtggatttactttttttttttttttttaagttttcctgggatagggatgatagtgtaattgttcatgcccacagtaatcctgggaatcttagttttttcctatgattgtggtttctcagcttctttacctctcctttgagttaggtccacctcagttttctaaaggtcaaattaaggcccccccaaaaatacagtatgtagctgaattcctttgaaagatcatgataaactcagaagaacaaacatagaaggaatgtcatttttaatctttttaaagagtgtgtgaaaattcactttaactggaattttaacaggcaagccggcatgcatatatgtagggatgtgtgactttcacagttgtcaccatggacttaggcttgattaaaatgctacacatttagagcgttttgtaattccttttttatatttttaagactagattttgagccatgtgatagttttacctcatattaaatatattgtacagaagtaaaaataatcatgtattcactttgaactcctcaaagccttttttatttatttacttatttacttacttggtttaggagcagaggtttaataggcaaaagaaagagaaaagagactagctctcttctgagaagagaggggtgtccaagtgggacttccctcctcagagccttttttttttttttttttttggagacagagttttgctcttgttgctcaggctggagttcagtggcacagtcttggctcactgcaacctctgcctcccgagttcaagcgattcttcttcagcctcccaagtagctgggattacaggcatgcgccaccacgcccagctaattttgtatttttaatagagatggggtttctgcatgttggtcaggctgatctcgaactcctgacaggtgatccacctgcctcggcctcccaaagtgctgggattacaggtgtgagccactgcgcccagcgctcacagccttttagtgaacacttgtatagttttctattgtaggcaaagccattttgtactgcattaattcatgtcattattttgaagacatctcttggtccttttttttttttaattgagatggagtctcgctctgttgcccaggctggagtgcagtggtgagatctcggctcactgcagccgcctccaccttccgggttcaagtgattttcctgcctcagcctcccaagtagctgggactacaggtttgtgccaccacacccagctaatttttgtatttttagtagagatggggtttcaccatgttggccaggatggtcttcatctcttaaccttgtgatctgcctggctcaaccttccaaagtgttgggattacaggcgtggccactacgcctggccctccttgtcctttttatgtcatgtctaagaactcctcaccaggttttctatcgtatttcctcctacaaattttatcttctacattggatctgattcatgttaagttaatttttgtattacagtatgaactttagtttcttttgttgttgcccatgaatttttttaagctccatttcttgaaaagactattctgcctctattgaattgcttttacaccttagcaaaaaattatttaagtatattcatgttggtctatttcttggttctctatgttattccattggtcttcgagcctaaacctatgccaataccactctattttgattactattgctatctactaaattttaaaatagggtaaacttattcctcactctttattctttttaaaaattgatttggggccaggcatggtggctcacgcctgtaatcccaacactttcggaggccaaggtgggcagattacatgaggtcaggagttcaagacctgcctggccaatatgatgaaaactcgtctctatttaaaaaatacaaaacctagccaggcaaggttgcaggcgcctgtagtcccagctactcgggaggctgaggcagaagaattgtttgaacccgggaggtggaagttgcagtgagctgagatggtgccactacactccagcctgggtgacagagtgagaccctgtctcaaaaaataaataaaaaataaaaattgatttggctttcatatcaattgtttcctttggctttgtatatacattttattgcatgtttgtctctatgaaatatgttgctgggattttgatataaattgccttaaatctaaagatcgttttggtgggaattgacatcttgttgagtcttgcagttcatgaatatggtacgtccctctgtttattgaggtcctcgttgatttatttcataagggttttgtaattttcagcttatagattatggacatattttaaaaatctagacagtttcttagagggccattatatgttgtattgagttttaaatttcagtttgcacttgatacttgcaattatagagaaatatataaattagaatttttatatgtattctgtgactttgctgaagtcagtagttccagcaacattttttaatagctttcttaggattttcttcataaatattaatgttattagcaaacatcaaacatcttacttctactttttttttttttttttgacactcttgttctgtcacctaagctggagtacagtggtgcgatcttggctcactgcaacctctgcctctcgggttcaaggaatttttaccctcagcctctcgagtagctgggattactagcacactccactatgcccagctaatatttgtgtattttgtagagatgaggtttcaccatgttgccagacgggtctcaaactcctgagctcaagtgagcctcctgcctcagcctcccaaagtgctggaattataggcatgagccactgctcctggcccaaacatcttatttcacctacccaatctatattacttttatttccttttcttgtgtttattgcactagctagaacttccagtgtgatgttgaatagaaatggtgaaagaggacatacttgcctttttcttgatgtttgggagaaagcattcagtgtagatcgttaaatataatacctgtagacttttatgtacatgttctttagaaagtttcccttctgagttgctgagggcttttattgtgaatgggcatgtaatttgccaaatgcttttcccccttcaattgatatgatcatgtaatttttcttctttagcctgttatgatggatggctttaactgattttagaatgttttgttgtttttttgagaccaagtctcactctttcgccaaggctggagtgcagcagtggagcaatctcagctcactgcaacctccgcctcccaggttcaagcaattctcttgcctcagcctcccaagtagctgggactacaggcgtgcaccaccatgcccagctaatttttgtatttttagtagagatggggtttcaccatgttggccaggctagtctcgaactcccaacctcaagggatccgcccacctcggcctcccaaagtactggaattacaggcatgagctaccatgcctggccgctttttgaatgtaggccagccttgcactcctgggataaaccccaccaggtcatggaatatgattttttttttttttttgagacgaagtctctgtcacccaggctggagtacagtggcacgatctcggctcactgcaacctccacttcccaggttcaagcgattcttctgcttcagcctcccgaatagcttggactactgtcatgtgccaccatgcctggctaattggaatatgatttcttttaattacaacattccatttgctagtattttattgagaaattttgtatctgaaatcatgagtattccatctggccaaatatgtggctggaatttcatcaaaagtggcagaggggttcccagaagggactgtttcaaaaagtcctgagataggacctgttgggattccaaagaaaggagcataaaacaccagggtaatcagttcaaatcattgttcggaggaactttcatacagggttgtgggggctgcagtgtgtccttgtgttggacagcaaacaaaaaaaaaagctctacttgtgtacgtctgcaatgagaagtttgggttatggagagtatatgagggcttaaggaatttggctcagatccagggccagtttctacatgtttagcaacatgtttgatctctcagtgtttcgggcaacaatgtaactgtcagtgcctgggcattccaatccctagcttacgtttaagcctgcaggggaagacatgcacttggtccagggtcacagagctgtcaaggcaccttgcacttctaggccaggacacagaaaggggagttggggaccactacaatgagcaatgttggtcagtagttttatttgtttgttttcactttatctgattttggtgtttgactaatactggcctcccaaaatcaactgggaatttttcctccagtgccaccccctttttatttgcatgacattttgtagaattggtgttgtttctttaagtattcggtagaattttttggtgaaaccatttaagtctggaggtttctcttgtggaaggtttgaattacgtagtcattcaacttaataggtactcaaactatttcatattgggtgggttttgatagattattatttttgaggaattgttccatttcatctaagttttgtaacttaaatttgtggagttatttatttgaagtattcccttattattcccttcatgacagaaggttctatagttgtatcctttgttttattcctaatagtggttatgtgtgtcttctttatctttgttaatcttcttagatgtttataaattttattgactatttcaaagaaccagctttctgtgtcattgattttctatgtgttctgactttgatttctattctgatcattattattttctttttctacttgttttggttgtatattgctgtttgtagattcttgaggtgggagcttagattatcattagagactttattctaacataagcatttagttttataagctaaactcagcactgtttgagctccatcttacattttcctatattgtaattatattttcattcagcttaactatttctcgattccatttaagaaattatctgtgacacatgggttatttagaagtgtgctcttttggccgagcacggtggctcacgcctgtaaccccagcactttgggaggctgaggcgggcagatcatgaggtcaagagatggagaccatcctggccaacatggtgaaaccccatctctactaaaaatacaaaaattagctggcgtggtggcgggctcctgtaatcccaggtactcggaaggctgaggcagaagaatcgcttgaactcgggaggcggagggtgcagtgagctgagatcgcaccactgcactccagcctggcggcagggcaagactctgtctcaaaaaaaaaaagaaaaagaaaagtgtgctctttcatttccaagtatttaaaatactcctgttatcatgttgttatttttagtttcacatttggcctgagcacaagctcgtttaatttcaaaacatttatatttgttgaagtttgttttggggccataaacaaaaagcccataaacaacatgcttgtggagtattccgtaggtacttgtaaaaaggatgtatattctggtgttgtttggtaaaatattctgtgtttatggatcctgttgattaatgatgttattcagactttctatattttcctcattttttgtctaatattttgctaaaagaaggatgttaaagtccccaacagtaattgtggaattttttatttcttctttcagttctatcactttttgcttcatatatttgaatgttctcttgtttggtgtatatgcatttatgattattatatcttcttcatgtattgtccctcttatcattatgaaactttcctctttgtccatgttcattttctgagctctgaagtatactttgtcttacactaatacaaggtataattgctgcatttttaaaagttaatgtttgcatggcttatctttgtccatttcttttattttcaacctgcctacatcattatatttgaagtaaattttatgtagacaacatgtagttgggtcctgctctttttctttttcactttgaaaatctctcttagttggtatattaaaccatttatctttaaggtggctattgatatgttgcactaaatatatcatttttttcctttgcttttcctttttttttttcccccttgagacagagtcttgctctgttgcccaggctccagtacagtggcatgatctcggctcactgcaacctccacttcccgggttcaagcgattctcctacctcagcctcctgagtagctgggattacaggcatgtgccaccacgcctggctaatttttgtatttttttagtagagacggggtttcgccatgttggccgggcaggtctcgaactcctgacctcaggtgatctaccacctcggcctcccaaagtgctgggtttacaggcgtgagccaccatgcctggcctctttttccttttttttctttttttgtttctgtgttggtttggtttttggcatattttattttcttgcctttttttttggatacctgtacaattttaagaattcagttttggtttgtctgtagtgttttttaaatttttaaattttattttaacagcaagctctaacatagtgcttttttaagtgtatttcttggtataattattttagtggttactttatgtattaaaatgtatttatgtaacttaatcacaatctgctggttgtcaacattatagcaatttgagtgatttgtagaaatgttacttttattaggtccctttatactcattattctttttttttttttttttttttgagacggagtctcgctctgtcgccaggctggagtgcagtggtgcagtctcggctcactgcaacctccacctcccagattcaagcgattctcctgcctcagcctttcagtaactgggactacaggcgcttgccaccatgcctagctaatttttgtatttttagtagaaatggggtttcatcacgttggcctgatctcctgacctcgtgatccacccgcctcaacctcccaaagtgctgggattacaggcgtgagccactgcgcccggccccattattcttttaatacaattgtcttgagcatttactctccatgtgctgagcaccatattgaatgatgttataatttctgcttctgttgtcaaacctatttatttaaaatctctagtcctatgtcataatgtcagactttgttgaaaggacaagaatagtctctttgcctgtatttcttaccctttccattgttcttctatcttgaagcctccttctaccattttctttgcatgtggagaacttcctgtagccattttttttagaataagtctacctgtgacaaatattctttgttttcttttatctgagaatatctttatttcttaattcttgaaggaaatttttgtgtggtataggattcatggttgacaagtcttttcttttggaaaacttgaaaaacattgcagcacttccctgtggcctctggttttaaatgagaaatctgcttccatttgaactgttcttcttctttactaatgtgtcatttctctctaactgcttttaaaatgtgtgtctttagttttcagaaatgtgattatgatgtgtcctagtgtggaatttttttatgtttatcctgttgcgtgattgttcggtttttcaagtcttcaggtgtatggcttctgccaaatctgggaaatgtttggcctttatttcttcaaatattttcattcccactcccttccccctttttgcaactcagaaaaactgagtgaggtctttattttaattgttccaaatgtcaggcctctattttaattgtttcaaatgttaggtctctattttacctgttccaaatgtccttgaagcgctcttcttttaagttttgtgaccttgatctgtctttggagagggctgcagggagtggagtgctgacgactctcactgcttgccttgagatggcgctatcctggaagtgaaagtataatgccaactagcattgccttggactgcctccttctgccttgctactggctaggggtgggagtttggctctcctgctgtgcaaagggaaggagcatgtagactttttaaatcaggttgcttaaaagtgggccaaaggggaggtggggcttttaaactggcaacaatcaaatgtcacatatcaaaaatggagtcagaggccaggcacggtggctcacgcctgtaatcccagcactttgggaggccgagcagggaggattgcctcaggccaggagttcaagacaagcgtggccaacatagcgaaaccgtgtctctactaaaaatacaaaaaattagccggtcatggtggcgcatgcctgtaattccagctactcaggaggctgaagcacaagaatcgcttgaaccctggaggcggaggttgcagagagccaagaatgtgccactgcactccagccggggcaacagagtgagactctgtctaaaaaacaacaacaaaaaaaaaaacccataaaacaaaaatggaatcagactgtcatacttttggttggctgaaaaataggaaaaaaaacaaacccagccttatttatagatggattatcttgatgtttggagtaagctaaaaatagattgatacatcacatcctgccttgagtggctgtgatgtggccagggatgtagagaaatcctctccatggcctgaagctggaccagtacaagtgggcgttacctttgtgctgggagaagtgccctgaggtaaagatacatgtgtgcttttgtgggaaatggtttgtctcgttgttcagaagtgctgcagatcagtgacaagtatatatagaacaagggcatgaaattactggagtgggcaaagtgagtggatatttatgtcccacgtcagtgcctataaaaagaaacccactgcagaagaggggaggggaacctagtagttaaggttaaccaggctcagtcctcagccatcccagtccttgcactctagggatataaaatatagtcaccaaggtgttaggggacggagggttttttttgtttgttattgttttttgtttgtttgtttgttttgagacggagtctcactctgtcaccaggctggagtgcagtggcacgatctcagctcactacaacctccacctcccgagttcaagcaattctcctgcctcagcctcctgagtagctgggattataggcgcttgcaaccatgcccagctaatttttgtatttttagtagagacggggtttcaccatgttggccaggatggtctcgatctcttgacctcatgatccacccacctcagcctcccaaaatgctgggattacaggcgtgagccactgcagccagccaggaatggaggttttaaaagggcccaacaacatggcatcctgctgaccacaactaaaatagctccgctccttacctactatttacgaagaccaacactaagacagtatatggtgtaatccctacaagagaacagcctgccccttggtgacatgtttacgtcagacctttttcctcccagacagtgcattgattcttatttaatggcattgctgctttttctggatatgacattaacttccctgccaacagagcctttgctgaaaccattataagggagtgtattgacttcttcatataccaacactggctggtcattaccttaaagatccaatcacaatgtagacacaaatggattagggtttgtagctaacgctgttgatgtcttgttctgtacaacccatcttcctacaagtcttatcaaatgacctctgggaggatgtcagcctgctcactaataaagtttttgttttgttttgttttttgagacagagtctggctctgtcccccaggctgtagggtaggagtgcagtggtgtgatctcggctcactgcagccttcgcctcctgggttcaagtgattctcatgcctcagccttcttagtagctgagattacaggtgtccaccaccacacccggctaatttttgtatttttggtagagacagggtttcaccatgttggccaggctggtctcgaacccttgacctcaattgatccaccctcttcagcctcccaaagtgctgggattacaggtgtgagccactgtgcctggccactaataaagttttattgcgccccctcttccgtctcactgcctcattttcattcctgtgcatcctgagttcatatctcagataaactccctgtactccagtaatcatctcacagtttactgccatagaatatcaaaagtaagaagttctgttttcacattctttctattaatgaacacccaattttcacattctttcccctctcacttctgtagatcgttacttcatactcattttctgaaatgtcttcctctttttgccccattctgtgggactcaaccatgcaaagctctaaacctagattgaacattagtccaacgttttctgagctgacccaggctgtttggaagttctgggaaaaaccttaacccccatttccaccaccccacagacctcttcccatccctcagtgaactaaaatctctggaggatccagtttctcagatgcccagtatttttctggccttgccattgccatttttgggggaaatcacttatccacaccaattaaaggaatgtcagatgaagttttctgttagtcttcctaaattgtggcagccagtgtctccccatgagttgcgtgcaaacccccacatggctctgtacaactttctctttgcaaaattaatatttttagtatataaaatgatatgccagatgtatggttgtctttcctaaatctatacagccatccctatgttttcacttactctaaaggaagttcaaattttgcattgttttcttgcatgttttctttatatatcattccttttttttttttttttggacaggtctaggggaatatctaaggtgtagtcttgaattatctctaagtttaaatattcttctattaatttttttgcctttttttatttttgtggagaatgaggtcttgttatgttgcccaggcaggtcttgaactcctaggctcattctatcctcctgcctctgccctcctaagtgctaggattgcaagcatgagccatcatgttcagtcctattaatttttcttaaaaaagataatgaagtaaactttgcattcagtaatctcctgttaagaatatttttggtgaattttgatgaatacatgattttgtgatcacaaaccaccattaaagctgtgaaatatttccatcacaagaaaatattccttgatatagtcaaactgtctcccaaactccagctataaggcccattcatttaggtttttctctttttgccttttttagaatgtgaagtgaatggaatcatataatatgtggttttcagatattttcacttggcatatgattttgggatttattcattttatttcatattgtttcttatatagagtagtttattttgtggatatgctacaatttgttcatctgttcacctgttcgtgaacaattttccaagtttttggctgtcgtgaataggacgttcatgaatatttgctacagatatttggatggaaacattttaacttgtcttttgtaaataactaagagtagaattggtatatcatatggtatgtttatatttacctatataggaagctgtcaagttgttttccaaaatgactatcattttgcattctcatcaaaaatgtatgagagtccagtgctgcatctttgtcatcacttggtatttattgtcactttgaaacattttactaatttcagcaggtgtgttgcagtattttatttgggttttaagttgcattgctaaaatgactcatgatattgaatatcttttcatgtgttcattgttgatttgtatatctttagttatttgtccaaatcttttttttttttttttttttttgagacagaatcttgctctatctcccaggctagagtgcaatggtgcaatcttagctcactgaaacctctgtctcccaagttcaactgattctcatgcctcggcctcttgagtagctcggattacaggcacgcaccaccacgcccagctggtccaaatcttttttcaatttttaattgcttttttcttcttaacacgaaattacataactttgctttaattttctcctttttaaatgttctatattatagtcatttctcagttatatgttttgcaaattgttttttttttcagtctttgacttgccttttaattttcttagcagtgtttttggaagagtagatgtcttaaattctgatgtaataaaaatattttgtctttatgtttttttgtgtgtgtcctgtctaattagactttgcctactgcaatgttgcaaagctttgacttatgttttcttctaggcattttatatttttagatcttttatgtggtctgagacccttttttttttttttttttaacggaatctcgctctgccacacagactggagtgcaaaatgatacaatcttggctcactgcaacctctgcctcccaggttcaagcgattctcgtacctcagcctcctaagtagctgggactacaggcacatgccactatgcccagctaattttcgtatttttagtagagatggggttttgtcttattggtgaggctggtctccaactcctgacctcaaggtgatccacccacctcggcctcccaaagtgctgggattacaggcgtgagccactgagcccggcctgagttaacgtttatatatgatctgaggtaagggtttcacattaaattaaatgtgttttataacccaacaaatcactctggggacataaccattaggaatgagggctttcttacaccaaaatacatgtacacaaagatttataacaatttcacaataatcaacaactataaataattcaaatgacagtcatctgtaagatatttaagtaaattgtgaaacagtcataaagtggaagaaaacacacagattaaaactgttacttttgtccaacaagatgaatgaattttccaggaaggaatacttgagttggggcttgtggaagccccaacctgtttgtagtttggggttgccatctgcctcacagagcaaagtgaagggtttggatttggggaacacaaaattgtgttctcctatgaaaaacctttctgtaatatagttggccgtggtatttgccaggaatgaaaggtcagggttggagacctcatgagtctgggttttcatttgaggttaagagaaaaggtagtgattataatcagaaaatctagagtgggtgtaattacctccagaactcactactgttagcctgggttttatggtagttatggaagtggattaactactaatgataaaaaatatagtctcctccacctcagaaaatctcgagtggcagtgacacgccaaacacacagtagcaaatacagtagaattttattgatacttttttaaccagacaaacctcataaatggtgattttttaaaaaaacagaataatgttcacatttttgcagcattaactgagagaaggcaaatttgtgcctgagagggaggaaatgttctcttcatttgcagttctaggaattacatgggaaacacatgtaggtagtcttcaagctataaatttaagatttgtttacttaatctataggtttatacatgtatgagaaatgggaaaaaagaataaatgtaatacattaaaaccaatacagtgaatctccacaccctccaatgaaaatatggaacaaaatctcagcatgcccagcatgagtctgccagattgcaaattccatccaacgcttcagaggatgctattatcaagatttcttcatagtttgacactttaaatatgtgtcaataatgatagctattatattatggcctgattttgaaatttatattaatggaatcatgcttgtagagatgttttttcatattaccgggatatatttttctgttatttttaaagatgtttgaaatgaatgtatatctttctaattatcatcctttgttgataacatgtacattaaatgggattgctttaaaattcattgaatctcatgagaatatgtagaaatgacattagttttggtacattgtaaagcaaaacttcaggttgaatatcctatgataatttaaaaccacaaaattatactattaataatagagcttgagcactttaagggaccatagagactcctttaatgtaatggtgagaatacagaggtacagagaagtcaggtgactagccgaagcccacactctaagataaaggccgaccccatctatttttcctaacttgtcagaatactgtaaattatactgcttttaaaagacctatgaaattggtgttggagatgccatcttgcaaataaaatattctcaaattttgattatctttgttttctttatgcatgggttacttagcgttttgtgacttgatatgcaaccacagcttaaaaaatttccagttatcttctatttttgatctgtaccctgattgaattattttatttcattttacacaagtttaaagagatttttaattgtcctagctattctcagttttgtttgtactctgtgctaaaacatgctgcaattggtgtctgttatgttatatggatttatcaggccaaatgtgttcatcatggtatgtgaatccaacagaactgtaccaatgttatgcctgcctttttgatattattactgagataacgaatatcaaagcagactggtttgtttagagatttaaccctttattctcattatactaaaattgttttatgtaatttgaattcatgtttaaaattgtaaagtatgttttcctgttgatattttctcccttatttctatttgtccgatacaaatgtgcatttttttgtgtgtgtttgtgtttaataattacaggtatgtattttctagacctcgatttaatatatttctatgacattataccttagatgtgtaagctatgaactaattattactggatatttttaactcatcaaaaattactgcctacttattcaataatttattccatgttcttttcttgtgatagctaatatatttgggcttaaatgcatcttcttattttgtgcttatcttttcttcagttttgtttcttgtgctttcttttaaaaacatgtatagattattaatattcttaattttccttttagtttggaatgtatatactcattttgttagtctttaagctgaaaattataacacatgtatttaacacatcagggtatagagttattaatacctttaccctcctcttggataatataaggcatgttatcatgtagtggtattgaggcatcgttaattctattgttctactcaacaaggggatattgttcatgttttatacagataatgaataattgtattgatccgcagatgcattccttatatcacgcagatctctcacctggaatcactttttttttgccttaaatataaccttttgggttacctttttaactaaaattttcattttttacctcatatggtcttattttatactgcttcttgaaaaacactattgttgtgaatagaaatctaggtttgcacttatttcttcagtaacttcactgtatccttccactacatccatgagtcactatatactggatgtgagtggagacaatttatattgtgactatagtcttcctgtgctacagaaacaaaatttgatggcggtggtgttttgttttgttttgtttttgtttttgcttttgttttgcttttgagacagagttttgctcttgtcgcccaggctggaatgcaatggcagaatctcggctcactgcaacttccacctcccaggttcaagcgattctcctgcctcagcctcccaagtagctgggattacaggcacccaacaccatgccctgctaatttttgtatttttagtagagacggggtttcaccatgttggccaggctggtcttgaactcctgacctcaagtgatccacccacctcggcctctcaaagtgctgggattacaggcatgagccactgtactcagcggtgatggtggtttttttgtgttttgtttttgtttttggagatggagtttcgttcttattgcccaggctggagtgcaatggtgcgatctccgctcaacgaaacctccgcctcccgggtccaagcaattctcccgcctcagcttcccgactagcttgggttacaggcatatgccaccaggcctggctaattttgtatttctagacacggggtttctccatgttggtcaggctggtcttgaactcccaacctcaggtgatctgcccgcctcggcctcccaaagtgctgggattacaggcgtgagccgccacgcccagctggtgatgttttgatgaggacaggacctgacttatgtctcttagtttcaggcaggaccctctcataatcaagtttgtgattggatctacctgccttgagtgccagaagggagaacgagaggtagagaggcaggtttcggttactgtgaatgaaagatgaataaggaagtgtcctctaaagtcacaaacttgaaacgggatgaattctactctccacttaggtctgagagcaattagtcctgctatttccaaaattagaatcttctttttaaaattttagttttagagacagggtctcgctctgttgctcgggctagagtacagtggcgggatcatagcacatagcagctttgaactcctagactcaagccattctcctgtctcagcctcccgaataactgggactacagtccaaaaatttgaatcttgtggcctgtaataacgagtctcttgagcagcatgcctacctatggttttaggcacactttttctgaactgttgaagaaataacccaaatgtgtgctttcatgtaaaatctttaatcatacctatgaggctagctgctgagttagggtgttattgtattttatgttttgataaatgccaaagatcctgctgaggcttagcctcccacagagtatatttacttcttttcatattttccatgtatctcttttattgattcatatcttgatagcatcatgtgtcttatttcactctatgtgaattgaagatagttttcagtcatctatattgatagttctgtaaatattcagttgtactaaatataagcaccccatatttgtatttattagaccagaattatcaatcttggcatgagaattcactagaactttaacaattttatattgtttctactaattgctgagataatggacataaaaatgctcagcatattcatagatttatgtctttatccttttacaaattgttgctttatgtaatacaagtcagcattatacattacatagagttcaaaatataatttcttggtgatcatttctttctttttttgttttctttctttctttctttctttttttttttgtttttgagatggagtttagctcttgtcgcccaggctggagtgctatggcgtgatctctcggctcactgcaacctccgcctgccgggttcaagcgattctctcacctcagcctcctgagtagctgggactacaggtgcccgccaccacgcccagctaattttgtatttttagtagagacggggtttcaccatgttggccaggctggtcttgaactcctgattcacctgccttgacctgccaaagtgctgggattacaggcatgagccactgcacttggccagtgatcgtttctttaatactgatattttctgatataaattttcattttcatgtgttaattctttgttgtattaaatatatttttcccaaagctgtttcatatagttttctaatattatactctacaagtgtttcttgtacccatactactgttttttgtttttgttctttatgagagacggtcttactgtctctcccaggccggagtgctgtgacaccatcagaactctgtgcagccttggctcaagtcatcatcctggctcagcctcctgagtagctgggattacaggcttgtgccaccacaccctgctattactttttttttttttttttttttttttttggtagagatggggccttgttacgtggctcaggctgatctattaatagaattcctgacctcaagcagttctcttgcttcagcctcccacattgcaggaattataggcatgagcctctgtgcctggccttttggaaatttttaacacatcaaaacttactaagtgctaatttaagaatttattccatactcatttcatgagatagctgatatatttgggtttatatacatcctctggttgtgtgtgtgcttttctttgccttacttattgtgtgtactttattttttgtaatgttttctttacatttacattttctttaaatttgtaagatatatactctgattcagttaatgtttaagctttaaaacagttatttaatacattatagagttaatgtatttgctctcctcaagaaatataagaaacttatatgttagttaatttgcccatatgagtttatatactattgaggatatgcatggtaattccaccattctgtttccagaagtattaatattttattttattttttattttaatttttatttatttatttattttgagatgcagtctcactctgttgcctaggctggagtgcagtggcacagtcttggctcactgcaacctccgcttcccgggttcaagtgattctcctgcctcagccttctgagtagctgggattacaggcgcccaccaccacgcctggctaatttttgtatttttagtagaaacagggtttcaccatgttggacaggctggtctcgaactcctgagctcgtgatccgcctgccttggcctcccaaagtgctgagattacaggcgtgagccaccgcgcccaacagtattaatattttatacagataatgagtggtctcattaatccatagatgcactcctctctcagatcctcatttcttctatcatcacagaccatcacctgggatcactttccttcaaccttaagaaggatcttaaaagtgttattttatgccagttatttttatccattaaatttctcattttgggcttcaaatagtcttatttcagtttttcttagccagtgcatttgtcgtgcatagaaatctgctggcagttatatctgtaactgactccgtatgttattccatgtgttcctgacacctaaatttatattggctttgagtggagacagataatttatattatacatatatataattatgtatgtgtgtatataaactacatgtgtatatatatataaatgctgtgtgtatgtgtgtatatatattttttctcaaagatatgaattatttctatgtcatctcataaaataaaccaggttataaaattttaactacagtgactcttaagtggacagtggagttaaaaattatgaagagcaattagtcttgatagttctgtgttttgaatcatacagcctataagaatgtgtcttctggacgatagacctacctgtagtttatgaaaccctcttgcatgtgatttttttcaattaaatgagtctattgatatattggtgtgcttttgtgcaaaaattataaccattaggggctcccacctgtaatcccagcactttggaagactgaggcagttggatcacctgaggtcaggagttcgagaccagcctgaccaacacggagaaaccccatctctactaaaaatacaaaattagccgggcatggtggcggatgcttgtaatcccagctactcgggaggccgaggcaggagaatcgcttgaacctgggagggagaggttgcagtgagctgagatcgtgccattgcacttaagcctgggcaacaagagtgaaactctgtctcaaaaaaaaattataactattatctatgatgctatttgatgagtgagggaataattgtacttttttctttttttttcaaaatcacactgatcctgaaaaggtggatctttgatttatcttcctaaagcagtgtatgtgagaaccttgtgttgaggaagactgataacagcttgtatgtatttagcacgatgtgccaggcctggtgttaagtactttttacctcacttcccatattcctaatgaggttggttgtagtgtttttcatcttactgatttttttttgtttgtttttgttttgttttgtttttggctaatgactttaaaagacctccagttcttgaacttcagctagggtcccatccccagagtttatcagaaggtataggttgggtccaagaattcacaggttttttaagttcatagtgaagctgatgctgtaaaactacatatcaaattgggaagcaatgaattagaagaggctcatgttttcgtcatgttacatgtaagttcctccttcacttttcgccatgaataaaagttccctgtggcctcaccagaagcagatacgggcaccatgcttcctgtacagccagcagaaaggtagctaattacatctcttttctttatatgttagaaaaattagaaggacattcaatgttttacaaaaaggcccacaaacgaaatacagacaacgttcaatttattaatacgtttcaatccccaaatctgagagaggtgaagcaggtttcccagggcctcagaagcaggattgaagaatgggtcccttgctggcgacttcagtggcgtggcattgtcccaggtggccatggaaatcagggtgcataccctttaaaagcagctgtggcctccgagatatcgttttcccagtcttttctccccctccctgcacgacgcctcttggcagacatccgggagaacccgaaaggcgctcgttgcctggttggatgcagggtacaaactacgttacccagaaatctgtgcccagctcattgttagccggcgtgcagccaatgacagcccagaaactgggcgtttcctgctgctctgggctgcaggggcgagacttctggcgtcgccgtcgtgacgtatttttcctatgcccggtccgtgcattctggttgtgaaggctgagttctagagatcgggtcggctttctacgcggctctcgtggaacctagcaaagaaagacagtgaagactgcaggaccttccttcgcgcttttgttacaatccatgacccctgtcgtgggacgggcggcctctcgcggaggtgtctgccggggctgggctcttaccgaggcctccacacacgtcctcttgtccttgtctcccccagaagcagccgccttagtcttgtgagcgtttttacaccgggtagattgagacttggagtgctacactcagcccgagggcgtccagcgcggtggaggcgtggggtttcggctgagcccacagggcacagactgttcatccgcttctcatggcagcggcggtgctgatggaccgggttcaggtgagtgggggcatccctcaagcgcaccccggcctggttggtgtgtcctgggatgttcgctctcatcgcgcacttcagggtgctcactccgtcgcattatgtggaggggttccgctcccctcatcagtggcataaggtgtggaacggactcgaaggcgcaggggcagttcgtacaaatgcatgcatggagaggagaatgagtttggggagttccgggaactctctgtgcctggtgagaacagggactagggggtcagaggtaggcctggaatggccgcccgaggagctggtcctctcttctgagggtgctgggagtcatgcaaggtttggtacagagaagggaggtcctctgacgcagttcttaaaaggctccctctggctgcagagtgggtagactagggattatagggtagacggggagatcaagatgaagtctactgaaatagtccaggtgagcgttgatggtctgggccagagtggtggcagcagaggttagagaatgtatgggttttgggttttgtatgtattttataaggaaggctgaccagattctctgatgagacatagtgatgatatcctgggattcttcacatgactgtcttcacttgagacagggggcagtgaatggaggtcatttctagtttagtgtcctgaatccaggccatgagttgtatggagttatgtggagaagtccccacctggcgaccaatgggatgagtactgcaaaagtatatcagacctaggaacaggtacgctcaaatgcttgtaggattgagtttggagcgctcagggaatctcaggtcttaattacctttgttggaaacaggtatcagaggaaggagttaggcaggaatggctggccgaggtgtcttgagtgtggtaaaagtcgtgggagatttggagcagaggagggagatgatctgactcagattttaacatgctctctctggctttcaggttgagaacagactgtgagcatgagggagcagctactgcagtagtgttgatggtgtctggtctagaggtgtggctgtggaggtgagagaagttggtaaattttctgttttttaaagtagggtgattggattttttgatgcgaaaggtgaaagagaggagagtcgtggatgaccctaaggttggtttgtttttgctgtagctggtaaaattatgaaaatgccatcaactgagatagagaagttggcagcaggtatgatttttagtggttatatcaggagttaggctttggtcatgtttaggttaagaggtctcagttgtcatcttagttgaggcctcaggaaaacacacaggtttttagttctggggaagggttctgttgaagaagttgaaaaaaatggtggccagtgtgtggagtgggatggggtatcttcaaatcatggtggtaatgctgttattcagtaagaaagttgaaactggacactgagagaaaactgggtctgttgcttaggcacctggacggcagtggtggatagtgtgaagacgcgagcgcttcctggacactgcttgcagagtggcatgggggatgagggatgtcatggaggtgcatatggcatgggccagtggcggtggggatctcagatgtgaggaaggtgtagtccaaagagtaatgagcacgttgggaggagtgtgaactgatgcccttaagactctagtattggcagctcatgggagaagatggagctgaagtttggttgtgtttagaggcatcgtctggacaacaccaggagaactggttggtaggcgagtatttgggacccttcatgccagacccagagttgagacagcatctgtctgcacacttgcctggttctgctctgggctggacacagtggtgagagggacatgaggagagagcagacactagtggtgccaaggtctgttatctcctcttagttgggaggctggggaggcgagggactagagagtgggtgtgtgagtgtgtagactggggaggagggggttctggggagagatgctgactgtggactcagctgtacttatcatggcagagttgtgtgaccttcgaggatgtgttcgtgtacttctctcgggaggagtgggaactccttgaggaggcacagagattcctgtaccgtgatgtgatgctggagaactttgcacttgtggctacactaggtaagtctgtgttttagttatctaatgctacatggcaaattatcccaaagcttagtaactgcaaacaataaaaatcaattatctctccagtttcagtgcattggtaatctggttagagcattttttgttgtttattattttgagggttttttttttgttttttgttttttgttttttcagagagtcttactctgtcacccaggctacagtgcagtgttgtgatcatggttcactgcagcctcaaattcttgggctcaagtgatcccccccacctcaccctcctgagtagctgggactataggtgcatgccaccacgcccggctattttactttttgtagagataaggtcttgctacgttgcccaggctggtctagagctcctgacctcaagcgatccttcctccttggcctcccaaagtgctgggattacaggcttgagccagtgtgcccagcctgatcacaccttcttatgcaggtgcttttggctctcatgaagttttaatcaagctctcagccagtgttgtggtcttacctgagaagaatccacttacaagctcactcacattgctttttgcaagatttagtttcttgtggcttgttggactgtgagcactgttccttgctggctgttggccaaagtcctccctcaggtggcctgtctgtattgtaccttatgacacagaagctaacttctctttgagcaagtgaccaaaagaatgttcaagatggaagcccaggattgtaacctaatcttgaaagtgtcatttcattatttttgccatattctattccttggaaataagtaagtccatccagcttacaatcaagtgaggaggcttacacaggggcaagagtaccaagaggtagggatcactgggaccatctcagaggctgtgttccacaggcctttacacccactccggtgtccttggtggggtttgagtcttcttctcttccccatgggccactctttctgtccatccagatccatgactcttctccttcccttctttgtttcccagagtaggtgctgtgggttctagggctggctgtgttcagtgtttctgccttcactgggtaatctgaacatctgttgccctagagctttgcaggaaaaggttaggattcgggagtttttcagtctgctaagcagattctacacagctcaggtgcccactgcctgagtccgtgtcatgatctttgcacctctttgtcctagattctgccctcatcctctggctgacatttcctggggcctgactgtgccaggaatttcaggggctgacacagtcacttcttgtggtgattacagggctgtcctggtacatccgccttggagagtattttttctaaacattctattttctctgtggagtgggtctacctgcgccactcacctgccctttgtttgcgttacagctttcattttcccagtcccatgcagttgcgcagttggagggggcagaaaaccttgggtgcctgacagggcagacatcactgcagccacagtaaaggagacctacagagggcatggccctgctgaatgggagctggaagagggtatctgttatggttgggttcaaatcgaaccttcaacttgttttgtgtttgtcagtgttttgttgccaaggcccatagtgattcttcacatctactttactttcctcattcttggcactttttccatttgtcatttctcacgtgtcttccatcctttgggtgttttcccacttttctggcctccgtgtttcaattgctctcttcaacactagcttactttaatgtgtcatgagttctgcacattaaatagtccgtgagaatgagctacttatttggagtcagattttcgtgggcatggacatacccatctgcacagagctcacctgacaccagcggccaaggccctgctgaaactctcttgcagaggaatcaggtagaggcttcacctatactccctatactctatgccattgtttttaggtctttacctcatagtcagggttcctccattctgtgaggccctatactgacaaccagcccttctttacactgatcctggccctcttgtcctgccaacaagccagtggactcgcactggtgttagacacacatttgtgatggggctgctgcctcccaccaaagtcagcatgcacttcaccagctcttttttgctttcaggtttttggtgtgaagcagaacatgaggcaccttctgagcagagcgtttctgtagaaggagtgtcacaggtcaggactgctgagtcaggtcttttccagaaagcacacccatgtgagatgtgtgacccactcttgaaagacattttgcacctggctgaacaccagggatcacaccttacacagaaactgtgcacacgtgggctgtgtaggagaagattctcgttcagtgcaaacttttaccagcaccagaagcaacataatggagagaattgcttcagaggggatgatggaggggcctcatttgtgaagagctgtacagtccacatgttagggagatcctttacgtgcagggaggaagggatggacttaccagatagctctggccttttccagcaccagaccacttacaatagggtgagtccatgcagaaggactgaatgcatggagtctttcccacacagctccagtctcaggcaacaccaaggagactatgatggacagatgcttttcagttgcggtgatgaagggaaagccttcctggacacctttactcttcttgacagccagatgactcatgctgaggtgagacccttcagatgcctaccatgtggaaatgtgttcaaggagaaatcagctcttattaatcacagaaaaatccacagtggagaaatatctcatgtgtgtaaggagtgtggaaaagccttcattcacttgcaccacctaaaaatgcaccagaaatttcacactggaaaaagacactatacatgcagtgaatgtgggaaggccttcagccgcaaggacacacttgttcagcatcagagagttcacactggagaaagatcttatgactgcagtgaatgtggaaaagcctacagcagaagctcccaccttgttcagcaccagagaattcacacaggagaaaggccttataagtgcaacaaatgtgggaaagcctttagccgtaaagacacacttgttcagcaccagagatttcatactggagaaaggccttatgagtgcagtgaatgtggaaaattctttagccaaagctcccaccttattgagcactggagaattcataccggggcaaggccctatgaatgcatagaatgtggaaaattctttagccataactctagcctcattaaacatcggagagtccacacaggagcaagatcctacgtgtgcagcaaatgtgggaaggcctttggctgcaaagacacacttgttcagcaccagataattcacactggagcaaggccttatgagtgcagtgaatgtgggaaggccttcagccgtaaagacacacttgtgcaacaccaaaaaatccacactggagaaaggccttatgagtgtggtgaatgtggtaaattcttcagccatagctccaaccttattgtacaccagagaattcacactggagcaaagccttatgagtgcaatgaatgtgggaaatgctttagccacaactccagcctcattttgcaccagagagttcacacaggagcaaggccttatgtgtgcagtgaatgtgggaaggcttacattagtagctcccaccttgttcaacacaagaaagttcacactggagcaagaccttatgagtgcagtgaatgtgggaaattctttagccgcaactctggcctcattctgcaccagagggttcacactggagaaaagccttacgtatgcagcgaatgtgggaaagcctatagcagaagctcccatcttgttcgtcaccagaaagctcacactggagaaagagctcacgagtgcaacagttttggtggccctttagctgcatctcttaaacttgtttaacaccagaaaattcacacaagagaaaggccttatgaatgcagaaaatatgtcatcttgttcatcctcataggactcacaccagagcaatgctctgtgagtaccctttgtgagggaaccatcagctagcagatgagcaccgtatattcattccaccctggggagattcctgataagcaccacatatgtgggaggctttcatgaggtgtgttgcactttgtaactgtctagagctcttgatggaattatatcactgccagtgcctgtggcggaagccatcttattgctaccagctgtgtgtgtcaatcactccattttgctcagggaaggcagacttctgtgctttctttcctgttccctacaggtaatcatgaatattttcaaggacttccccccccccccacttcaccccctaccattgagggtcctcatcttttccctcatgattaggttctgagcaaacatgatctagctctcaccaaaaggacctgagctagggtctgctgggatttcctgacacgattttccatcttcatggacaatgttaactgtaaacgtgatagctgtgacttacttgtcttactgccaaatcgcccaaatttggaactgcttgtcccatgctgctctgatttatacagtgataagggcctattgtggcagtctttactcttggggattttgttactgtgtagagtggattgagaaaagaattgggttctgtcatgaagggagtagcaccttttgtgggcaccacctttatgtgcctcagaggggaccaaaggatggcagaaaactgttctcagtctagtttgacctaatttacactattgccctaggcttgctaggaaagactgaaaaaatttttgtgcctaactttgtggcctggctgccaggatttcctgtgagcccagtgaggagggcatagttggtgcgaaaatctcctgtgcttgtggaagcaacataagttgggtcccttaactgtcacgtactccccagcactgttgagggattgctgtcttctgtacctgtacaggatcaagtccctgatatccagaaccccataggcaagtaacattgactgtaagacctctgtagggcaatgtgaaaatcatgattgctacagaagcactgagataatggagtggggatgactgtggcaaacaaaaggagattcgaacattctagaggggcatccacaagtctcggtgcagttatgatggtgtgggatgggagtgcatagaaattctcaggaccttcagacatctgtatctcctgtggccaaggccactgtcagaggaaataatctaaatgtttgtggattcctgtgtctccctgggcagttgacctgcacagacaggaacctcagcagtgacagaagagagatccagggatgggtcttctctgacccagccagcattccgagtgactgaggtggatgtggacatcattgcttaccaatttttaccaacattgaggcagggctcactctcctaaattgtagggagaggaatatggtaaagccaaaatagttgacagatctaactttcctagtggaacagtatatatagattttaatgaggaacatttatttaatagctttatggaggtatgattaacatgcaataaactgcaaatatgtaaagtgtaaaatgtgctgtttcagcatgtgtgtacacctatgaaaccaccacagtcaagatatccaacacaacaaaagattgtccctttataatcctcaatttttccttatcttgttttccacaattcacaagcaacagcaagcattttctataattttataaatgaaaccatatggtgtgtactttttagggggtggggctctggctttttcagtaaacataactattttaaggttaatccattatcttgttgcatgaatcaattgtttgctcatttgtattgctgcgtagtatttcagtatttcattgtataccacaatttttcttctttgtcaacttaattgttatggatgtttgggtaactttcagtttttggctattacaaataaacctctgaagatttgtgtgcaaattatggctgaatgatattccattctataaatacacctcagtttctttatccatttacttattgaaggacggttgctttcaagttttggcagttatgaataaacctactacatatttgtatagtttttctgtggagatgttttcaactcatttggatatgtgccaaggagtgcaattttctctgtcatatagcatgtttagtcttgtaagaaactgccaagctgtcttccaaagcggctgcaccatttattttatttatatatattttttgagacagagtctccactctgtcacccaggctggagtgcagtggtatgatcttggttcactgcaacctccacctattttagtagacatgggtttttaccatgttggccaggctggtctcaaactcctgacctcaagtgatcaccctcctcggcctcccaaagtgctgggataacgggggtgagccactgcaacgggctgtggctgtaccatttttgcatccaactaacaatgattgaacattcctcttgcatctcatcctaatcagcatttggcattttcagtattttggattttaaaatgccattcaaataggtgtgtagtggtatgccattgttgcttttatttgcaattccctaataacacacaataagtatcttttttaaaggcagggttgttttgttttgttttgaaatggagtcttgctctgttgcccaggctggagtacagtggcatgatttcggctcactgcaacctccacctcccgggttcaagcgattctcccaccttagccttccaagcagctgggactacaggcacccgccaccatgcccagctaatttttgtatttttagcagaaatggggtttcgccatgttggccaggctggtctcgaactcctgacctcaggtgatctgtctgcctcggcctcccaaggtgctgggattacaggtgtgagtcactgcgcccagcctggctggggtttttttatgtgagtttcacacacctctgagtaagtggcttgcagacagagaagttaacaactttggctgttagcttgaacctgtgatttatgaataccaaaaagacaaatacagaatctaaggaaacacataacagtcctgtatacacacagcagctggcagccctattcccggtgtgtcccatatacctaccattgacctgaaacccagtttgtacgtgctcattgaacattttgtagagcagtaaatacacatcatcacacagattgcctactcatttttatttttatttttcgagacggagtcttgcactgtcacccaggctggagtgcagtggcgcgatctctgctcactgcaacttccacctcctgggttcaagcgattctcctgcctcagcctcccaagtagcttggattacaggcacccgccaccatgcccagataatttttgtatttttagtagagacagggtttcactatgttggccaggctggtcttgagctcctgacctcgtgatccgcccacctcggcctcccaaattgctgggattgcaggcgtgagccaccgcacccggccttcatttttattttttgacaagtgtttccatttgttatctctatccctccaaacagttaataagcgatgttttcaagtatgaaataagaaatacatataggagacagaagcataatgtgtccaggttccagcacagccagtctcaacttcattctttgacttctcagactcttgctcaaactctactgtaaccttgctttttccccccttcacatgtcacagagagatttctgtaggactatttctgccactagttttgaaataacataatcactgttagtccaaactgcaccatcctgtaagccccctgccatctcacagaccttggtcagagtgaagcattccacggagtgagggccttgagaaacatcctgcccaactgcctgactttcttatcacatcgttctgggaaaagatccaaggaaggtcactatcacatcctgccggataaaaggccaaactgcctcaggaacatcttacgcacatcctttggccgggtgctgtggctcacgcctgtaatcccagcaatttgggaggccgaggcgggcggatcacctgaggtcaggaattccagactggcctgaccaacatggtgaaaccctgtccctactaaaaatacaaaaaaattagccgggcgtggtggcacgcgcctgtaaagccaactactcgggaggcggagttcaagaatcgcttgaactccgggaggcggaggttgcagtgggccgagatcacgccattgcactcaaggctgggcgacaagagcgagactcctccaaaaacaaaaaaaaacccaccatcctcctgggcagcaagtcataccctcccgccgcgccccctgccccccacccctgacccctctcatccaggcctataattgccccagcctgtaagcagtgaggggttctggcactaagctagttctccccatcacaggtctcgtgctggacataaaacctgcattgctgtagagctgccaactctgcctttctttaaccctcgccttcccttcaaaacctaacagttattattaatagatttctgtaattttcatttcacaagtattttcacagataatttcaactccctgtaaaatgataactcacttctcaggaaggagataagatcatgaaagttcacagtttttattggggataatacgttccctgtgtacatatactccaactatggaatggcacaaaatgtcctgtcaggaaatggcatgtatcagtcactctcattttcagacaggattgagacttttaaaataaatgtaaaatatttcagacatgaagtaataagtattattagaataaaagcattgcactcttggtaggaacacaatcactgactctacagacagtaatgatgttttcttctggatccagaggcacagcgtcaccctttcaatctacgtcggtatctcctgtcttcttttgtgcaaattcccagccatgtagtctttctttgttctcttggaccaaccatattgaagcttaataaatagaagtcaaagtttaactgtatgtgtatttgaaaagcaacatatggctgagaggcatgagtagagacagagtgcctttgtggtatagtgtgtccctttggcggtgtagccgttgagaacttgctgtgcttcacaatccgatatcataggtccctcacatttctgtgagtatcctagaccttacttcaagaaaatctggttatgtcgcctttaagagcaacccaagccccgtcctgtccgtggagtccggcactctgtttaccagctcccctgacggtgccactgagcctctatccgccatataaggactgaccaacgctctaaggcaagtccagaagcggtgtcgaaacttcataacccagaagacactgcggttctcggcagcgcgactgacccaatgaatgtgcaggaaggaacctttgcgtgcgtgcgtgcgtgcgtgcgtccgtcctcgtgctcgcgcatcgtaggagggcgggacttccggcgtcctcttgccgtggttgatttgattttctctggtgttttcactagttccggcctttggcgctctatgacgtcaccgaagtgacggagcggaaaagcgcgagaagcggcttggttccttgtacgcagaggcggtagtgacacaggcacaactgacagtggcagaagctcagctgacaaggactggggacggcggtgtccttgtcttgcctttgtcgcccccgcccctctcttccctggctggacttgcggagtccccgccgaagaacccgaggtgggtgccccgtcccaggcccccccccacctccgcccgacccctccttccagtgctgaagcccatagaaggggccctgcaggtcaggccccttgtctcgaagagaggggcgttcctgtgtggggtccccgtatcagctggtttgatgcagcctcagagctcccttcggggatctcaggttcagagcatggaggtgctgccaagtgggccgcgtcggggagcccggagtgtgggttgtttctgcgggaaagagagggttttgtgaattttctcttggaatggcagcctgagcagccggtataaccatggaaggttgtcaagggaagaccagtgggaggggcaggtccagagttagaacgagcaggatggggaattgacacagagagacccagaagaggccactgcagtggatcccagaggctgcaccagagccgtggtataagagggacaatgtgatgggattctggatagacctggaagatagagccaacaggttttcctgccgtatcagatatgtctgtgagcaaaaatagggagtgaagggtcatttttttttttttgcccgaacatctgaaagaatgaagttggggaagtcagcagcatgagaagtaggtttcatggagaagatcatgggttggagtttggccagtgtgattctcaggcgtctcaagttgaaaatgtcacatgggtagggggacagaaaggtgtggagtctacagaggagaactggtgtagattcttcaaaagaatagagggtggccgggcgtggtggctcacgccggtaatcccagcactttgggaggccaaggcgagcggatcacaaggtcaggcgttcaagaccagcctgaccaacatggtgaaaccccgtctttagtaaaaatacaaaaattagccgggggtggtgacgcgcgcctgtaatcccagctattcgggaggctgaggcaggagaattgcctgaacccaggaggtggagattgcagtgagccaagatcgcgccattgcactccagcctgggcgacagagcgagattccgtgtcaaaaaaaggtgcggagcgcgggtctcttccgcggaaactgacattgcgtttccgttgtcggcctcccgctgcaggagccatatattgaagaccatgtctggaagcttctactttgtaattgttggtcaccatgataatccagtttttgaaatggagtttttgccagctgggaaggcagaatccaaagacgaccatcgtcatctgaaccagttcatagctcatgctgctctcgacctcgtagatgagaacatgtggctgtcgaacaacatgtacttgaaaactgtggacaagttcaacgagtggtttgtgtcagcatttgtcaccgcggggcatatgaggtttattatgcttcatgacataagacaagaagatggaataaagaacttctttactgatgtttatgatttatatataaaattttcaatgaatccattttatgaacccaattctcctattcgatcaagtgcatttgacagaaaagttcagtttcttgggaagaaacaccttttaagctgaatggagaaaattccaaaataaattatatcaccacaatggtgtatactcaggaatgtgtacattgtaaattacttgattaaatagcctggaaatcttttgtgtattctcagcttatctaaacttaatgaaatttcttttatatttaaaaatagtacattctgtctcatgtcacatatcagtagatcaattagtatttccttgtgaacaatgttatttataaagaactcattatcaataataattaatttctttcttttttttttttttttgagacggagttttgctcttgttgcccaggctggagtgcagtggcacagtctcgtctcactgcaccctccgcctcccaggttcaagcaattctgcctcagcctcccgagtagctgggattacaggctcccaccaccatgcctgcctaattttttttgtatttttagtagagacggagtttcgccatgttggtcaggctggtcttgaactcctgacctcgtgatctgcctgcctcggcctcccaaagtgctgggattacaggcatgagccaccactcccggccatgaaatatttttacttaaaaattgggaataagctttctttttctttctttctttcttttttttttttcttttgagatggagtctggctcctgttgtgcaggggctggagtgcagtggcacgatcttggctcactgcaacctccacctcccgggttcaagcaattctccttcttcagcctcccaagtagctaggattacaggcatgcaccaccacgcctggctaatttttgtatttttagtaaagacgggatttcaccatattggtcaggctggtcttgaactcctgacctcgtgatccgctcgcctcggcctcccaaagtgctgggattacaggtgtgagccactgcgcctggccatgaaatattttttacttaaaaattgggaataagcttttttgtgtgtgtgtgtatgtttttgtttttttgtttttgagatggagtcttgctcctgtcatgcaggctggagtgcagtggcacgatcttggctcactgcagcctctgcctcccgggttcaagcagttctccttccgcctccagagtagctgggattacaggcatacgcctggctaatttttgtatttttagtagagacagggtttcgccattttggccaggctggtcttgaactcctgacctcaggttatctgcctgcctcggcctcccggagtgctgggattacaggtgtgagccactgcgcctggctgggaataagctttcgacttgcccaattcagataaattgttttttttttttttttttttgacgtggagttttgctctgtcgtccaggctggagtgcagtggcgcttggctcactgcaacctctgcctcctgacttcaagcgattctcctgcctcagcctcccaaagtgctgggattacaggtgtgagccaccatacccggcccagataggttgatcttataacaatccagaaacaaatgtcatagtcaagatttggtagatagatttaaaactaaaatattctgccattggaagtgaaatgtcatagcacatacgtggacgttatgcatttagagatgttataaaaatgtattggcagtatacatagcactactcaagaagccaaagaaacacttgtgcagtgctaagtgtcacatgtctgcttctgccagaggctaggaatagtgatcttgctataatgtgagaacctgaatcatgtttgtaaaataggaggctgggagcagttccaggccacagtgaagtgtgttgcttctgtcactttatattcttatatttcctttccctcagacaatcaactgttgatgcctgtacttgtgaaaagttgtaaggcaatttttagggttgttgtcaaagaaaagcttggattacattaacatttgtactcagccttttaggcaatacaccagagggggctgggaattgtctgtttgttcctatgataagtagatcttactgtaaaatagtaaatgtccattgaaaagcaagtaacacaacctgtgctaactgggagcacttgaacaattttgttccattctgaataacttttcagcaagtaattctaagctttgtcttatatccttgtgtaaaattgctaccttcatttttaccctatttgatttcttaaatggtttgttcaagaaaaaaaaaaaaaaaaaaaagaatagagggtgtagattggaccgggtcctgaggatccaatttggtagggaagtctaaaggtcattgcctgcaagctatgtggtgagggaggagagagctgatacttggggttcacaccataggtggagccataagccagatgcttactttagaaaggcgcagacctgccataggaaggattttgtcctctgcctagaaaaagggaggcgtgggtgggataaggaatgggcttgggatggagactaaggtttgagatggtttatattctgcacctacaggcttggctgaccctcagggccactctttgtgggaaaagaaaaaagttatccaggctagtggagcagctgggttctaaactagggcactgctttttccccttctccacatatcaaggcaagattggatgatctactgccccagtcaaggtctgccagcaagctcccctcagagccttatgtaacaggcaggcctggttgcagaggaccagtagctgacctacctgctcagcccttccctacaactcattaagaatatatgaaacacttattggtataagcactaaccagtgtccttctaaatgtgtacacataggcagttagaagtgaagctattcattgagttaaattcctgcaaacactacataattgatttgacccaaatttgcctataattatcaacataccatggaaaattttagtatcctctaaaattttaaaagctaaaaatatacacctcagtttttgaaattctactacatcatttatactgaaaacatatagtaaaccattaatccaagaacagtaatagctgatatatatgatgagcaacgagtgtttgacaccggtaagagtcctatgaggtgggagccattcttacaacctatttacagatgagagcactgaagctccagcaggttcagttcttttctagagtcacagtgctgctaagagccaacagtgaagtcggaggagctgagtttatacaatcaacttgagatcagtttgctttagggtaaggaagaagagatggtggtccaactctgcctgtaagatcttcccatcgttgcccatttctcacggtttccctcttccttcagggtcccctggcgatggcagaaatgaaccctgcacaggtgagtggagtgttttctacctttcacctaccagttatctcatagatggttttggcacctccatgtaaagaaaagtggtgtccagagactctctttctgtctttctccctctcttatgtctgaaaagtgagtgattccaccagttctagtatcttaaattaggtctgggatttttgtttgattgttttaagtttactgtgacaccttacctggatggccctggattatgtggagtggctcccatttttgacagttgacgtggtaacatctgtcagagtgtcatgggcacaagattaagaatgtttcagtgtttagaggagagactgaactggatttttagggaactgcaagtgtctgttatatcggataggaatagggagcagagtgggaggtggctagagacacacaaacatcaggcctggaatgacagcctaggtcctgggtctctaatctaagggaggtggtagatggggaagatttgaagcagaagagggcagtgataggaccctagcttaaggaactttctttggcgtctgagtggaggacagactgtggaggtgagggtaatggcagggagatctgagaggatgttcctgcagcagtctaggtggatgttggtggtgacttgtcaagagtagcggtggcttcaggatgtgttttgaactggagctgcccacattttatgatgtagagagtgaggcagctgggggggtgggatagaaggggaatcaggagtggccccatggtttttgtttggaagcatagatgctccatcagctaagatgggagaagtcagcagtattaggaattttcagagtgagtgtgaggagtcagtgtttgttcaagccacagatgtctcagagactcctggtggaggagttcaggttggagacgtccacactatggtggctgtcgtatggaccaggatgaagccatggattcagtttaggtgacagcatctctaggttatggtggcagtgctgttcgaagacagagaattggaatggggcatgagaactgggtctcttactgggtagctgtgcagtggtggaggagtcactagacaaatgagggaatggagtgtttgtggggatgagtgtatgtgagatggtggggtataggagtgagaaagacttctgaaggagagtggacatgatggggttgctgaggagggtaatagggtgaggtcggagagttgctaagcatcagttggaatgagatgaggatgggaattctattagtctgttttcatattgctacaaagaactacctgagactgggtactttatgaagaaaagaagtttaattgactcacagttcttttttttttttttttttttttttgagatgtggcccaggctggagtgcagtggcacaatctcggctcactgcaatctctccctgccaggttcaagcgattcttctgcctcagcctcctgaatagctgggacgacagactcaccccactacgcccagctaatttttgtatttttagtagagatgggctttcaccatgttggccaggatggtcttgatctcctgacctcgtgatccatcctcctcagcctcccaaagtgttgggattacaggcgtgagccaccgcacccagcccatagttcttcaggcttaacaggaagcataactcggaggcctcaggaaacttacaatcctgtgtccatgaggcaggacacagctgagagtatgtgaagtcctcacatggtttgggcacctgacagtgaagtgagaaacagggccatgtagggaaccttcaacccagggcttagggctgcccccggtgctagggaactttggtgttctggggcaggactgggagtgaattggatgctgagcgtatttgccgtgcaccacctggtttctgtgtgcagagtggcctgttaggaggtgaaggaaatgcctgtggtgtgggctgggaggtgtctgtggaattgactggagtggaggtgtgagagatgggattggagtgctgtccaaagagtgatgtgcaggcaggaggagtgtgaatggagggcctcaggccctggccctggtagctcaagggaggaggatgagtctgagtttggttgtcttgggaggcaagatctgggtgactccatggaaactggctggcaggagaggatggatccccccacgggaggcccacattccttttctaccttatcttccatctgtttcctctgtgtgctggacacggtggccaatgtcaatatggagagaaaagtcactcatgccacctggatgtggtttctcttccacattgggagggtgtagagattgaggaaggaaaggaggtgtaggggagagggatgagttcctggagagagaaaagtagcagtgattgtacccattggggttttttgtttttttttttttagatggagtcttgctgtgttgtcacccaggctggagtgcagtggcatgatcttggctcactgcaacctgcacctcctggattcaagcagttctgcctcaatctcccaagtagctaggactacaggcatgtgccgccatgcccacctaatttttgtatttttagtagagatgggatttcactgtgttggccaggctggtcttgaactcctgacctcaggtgatctgcccgcctcagcctcccaaagtgctgggattataggcatgagccactgtgcctggcccccatggagttttaatttatggatgtgagtgagtgatgccagggacaggccaatgacactgaaagaagatatttattccttacgtttccctaaggaggttacataccacataacacagggccacacggtgaaacaccagatttgatcaggaggaaaattggagtgagtttagtttagtccacagatgctgttggggtttccaagggaaacaaggcagggctggctgtcaggatagtttggctagttttagtaattccaggacacctgggctattgggactgtccctagttgtgcagtacctgtccctgggttgatttagagcatgggaaatactgacttggtttgagaaagttagagatggagatggttaagaatatgtgcccaggatggtaggggagatggaaacacatttagctgttagtttgtccctgtgtttaatgggtggtaaatataagtagaaaataaatagagaacttaagtaaatacagtttgaaaagctgctcatgtattcatctttcccaatttggcagggtcatgtggtttttgaagacgtggccatatatttctcccaggaggagtgggggcatctcgatgaggctcagagattgctgtaccgtgatgtgatgctggagaatttggcccttttgtcctcactaggtaaggccctcacacttgcccagtgtcctgggttgggctgtgttgtctccttttacctgaaggcagctctgcgtttcccacagtgagaccatgggtgctgcttcttttccttgtttcctgacatatgttccatgagagtcaggactgcaatatgtgctgtgtgcttcctttttcctggcagccccatcctctgctgttctgaggcttgcaagaaagggctcaggatccagaaatgttgaaggtgacatagagacccactggccctgtgttctattcaaatgcatgagacctctgtgctctgttgttcccttgctcttgccaatatttcttggtcccttcttgttcctggaatttctggcactgacctgatcactaatttggtgaaccactggcttgattgtgtaggatgtagaaatcttctgtgaagttctggtgattatcgaatgtgagatatcatcaggtgatctctctgggaatgtgctgtcttgtctctttctgtgtctttcccctaggactggtctctttcaggtctcacagactgtcaccttaagcaatggggagggccctggtacccaagagggtggatattactccctgaagggctgtagagactcagagggacatgatcctggttcctgggagttgggaaaaggtgtaatatcacagctggggtcatattactaggaatctgtctggtgacccctgttgtttagttgaagactggttgccacaactcactcttcttttccttcccccgttgtcatttttactctgacttctaatccctggcttccagccgttacctattttcttcaactgctccctctgcagtgccatccactgcatgacctgtacttaaggtgaggtctgcatgtatttgtcagtagtccctgaacaccatctcctctgtcacaatcagatctctctgggtttagacacagccttctacacactgctcactagtcaccagcagccatggcctgtggaaagccatttgcagagaagtgacttggagaccctcctcctctctgcactgtacccctctcttgtgttcttacccatcatcagggctctcccattatgggtatttgccaggtccaactctgcacagcaggccttcttctcattggccttagtgtttgtattacttcattctcactctgctattaggaaatacccaagactgggtaatttctaaaggaaagaggttaattgactcacaggtccccattgctggggaggcctcaggaaacttacagtcatggcggaaggcaaaggagaactaggcatcttcttcacagggcggcaagacaaatgagtccaagcagggaaaatgccagacacataaaaccagcaaatttcatgagaatttactcagtttcatgagaacggcatgggggaaactgttcccatgattcagttctgtccacctggtcccacccttgacacgtggggattatggggattacaattcaagatgagatttgggtggggacagagagcctaaccatattattccaccccggccccccccacccaattttatgtcccttccacatttcaacaccaatcatgccttcctaacagtcctccaaactcttaattcactctagcattaacccaaaagtccaagtccaaagtctcatctgagatgaggcaagtcccttctgcctatgagcctgtaaaatcaaaagcaagttagttacttctaagatataatggggatagaggcactggataaatgtacctattcctaatggaagaaatgggccaaaacaaagcctacaggccccatgcaagtccaaaacccagcgaggcagtcattaaatcttaatgctctgaaatgatatcctctgactccatctctcacatccagggcacagtgatgcaataggtgggctcccactgtcttgggcaactctgcccctgtggctttgcagggtacagaccccccctcagctgctttcatgggctggcattgagtgtctctggctttttcaggcacacgttgcaagctgttggtggatctaccattctggggactggaggacgtggccttcttctcatagctccactaggtagtaccccagtagggagtctgtgtgggggctccgaccccacatttcccttcctgcagtgccctagcagaggttctccgtgagttccacccctgcagcaaacctctgcctggacatcaggcatttccatacctcctctgaaatctaggtggaggttccctcccaaatatcagttcatgacttctttgcacccacaggcccaacaccatgtgcaagccaccaaggcttggggcttaaactctgaagcaatggctggagctgtaccttgccccttttagccatggctggagttgaagcagctgggatgcagggcgccatgtcccgaggctgcatagagcagggggacccagggccagcagctgggatgcagggctccatgtcctgaggctgcactgaacagcctgggccaggcccacaaaaccatttttccctcctaggcctctgggcctgtgatgggaggggctgccgggaaggtctctgacaggcactggagacattttccccatcaccttcgtggttaacattccactcctcgttacttatgcaaatttctgcagcagccttgaatttctccccagaaaacgggtttttcttttctattgcatagccaggctgcaaattttccaaacttttctgccttgcttcctcttgaacactttagcacttagacatttcttctgccagataccctaaatcatctctctcaagttcaaagttccacagatatgtagggcaggggcaagaagctgccattctctttgctaaagcatagcaagagtcacctttactccagtccccaacaagttcctcatctccatctaagaccaccacagcctgggcttcatggcccatattgctaaatcagcattttgatcaaaaccattcatcaagtctctaggaagttccaaactttcccacatttcctgtcttctgctgagccctccaaactgttccagcctctgcctgttacccagttccaaagtcacttccacattttcgggtatccttacagcagtatttcactacctcagtaccagtttactatatttgtccgttctcacactgctattaagaaataccctggctgggcacagtggctcactcctgtaatcccagcactttgggaggctggggcaggtggatcatctgaggtaggagtttgagaccagcctggccaatatggtgaaaccccatctctactaaaaatacaaaaattagccgggtatggtggcaggtgcctgtaatcctagctactcgggaggctgaagcaagagaatcacttgcacccagggggtggaagttgcaatgagctgagatcgtgccactgcactccagcctgggtgacagagcaaaactctgtctcaaagagatacgcgatacttggccaggcttggtggcccactccggtaatcccagcaccttgggggggctgaggtggacgggtcacttgagatcaggagtttgagaccagactggccaacatggcgaaaccccgtctctactaagaataacaacaacaacaaaaattagccgggcatggtggctcatacctgttatcccagctacttgggaggctgaggcaggagaattgcttgaacccaggaagcggaggttgcggtgagctgagatcaagccactgcactccaggctcggggaaagaatgagagtttgtctcaaaaaaaaaaaaaaaaaaaaaaaaaagacatacccgagactggataatttataaaggaaagaggttgaattgactcacagttccgcatggttgggaggtctcaggaaacttaccatcatggtagaaggcaaaggagaagcaggcatcttcttcacaggacagcaggatggagtgagtgcaagcaggggaaatgcaagatgcttataaaaccattagattggccgggtgcagtggctcacacctgtaatcccagcactttgggaggccgaggagggcggatcacctgaggtcaggagtttgagaccagcctggcaaacatggtgaaaccccatctctactaaaaatacaataattagccaggcgtggtggcacgtgcctgtaatcccagctactcaggaagctgaggcaggataatcacttgaacccaggatgcagatgttgcagttagcagagatcgtgccactgcactccagcctgggcggcagagcaagactcagtctcaaaataaataaataaaacccatgagatctcaggagaactcatgatcatgagaacagcatggggcaaccgtccccatgattcggttaccttcacctggtcccacccttgacacgtggggattatggagattacaattcaagatgagatctgggtggggacgcagagcctaaccatattgtttccagaccaaaccgagggtggggctgcttattcttgcagcccaataatgagatgcagatgaactggggaaaaagagagtttttatttctgtaaccggttacagggagaaggcctggaaattattgccaaaccaactcaaaattacaaagttttgcagagcttatataccttctaagctatttgtctacatgtgggtttgcattcatctaaagatataagtgattaacttctctgtaaccaagatctgagtcctgaagaccttcctctggagcctcagtaaatttacttaatctaaatgggtccaggtgctggggtgattacccttatcttgtctccttttaaatcatggaggtttggggagtttccttagaaccccaataaacttattcgtggaggcctggggagtttcttcagacccccaataaaatgtatttaatcctaaacgagtcctgttaagaattccttcattatcttttcatcctttaaggcccaggaaaggcctaggcaaaactcttggtgggcttttgttacattccagcctgtacatgagggcactggctctatcagcttttaatcaacttaaccactcagtcagtgctgaaaccgttgtcatggaagcctgcctgctcagctgttagtgagacctggcctgccacagtaccagggttcatgcctgtcaccaattccatgatcattttcatggggtgtctgactgacatttgtgatggggttgcctccgctcatcacagtcaacatgcacctcaccagcatttttattcttacaggttgttgccatggagctgaggatgaggaggcacctttagagccaggtgtttctgtaggagtgtcacaggtcatggctccaaagccctgtctatctacccagaatacccagccctgtgagacatgtagctcacttctgaaggacattctgcgtctggctgagcatgacggaacacaccccgagcagggactgtacacgtgtccagcacatcttcaccagcaccaaaaggagcagattagagagaaactttctagaggggatggaggaagaccgacatttgtgaagaaccacagagttcacatggcagggaagaccttcttgtgcagtgaatgtgggaaagcctttagccacaaacataaactttctgaccatcagaaaatccacactggagaaagaacttataagtgcagcaaatgtgggatattgtttatggaaaggtccacactcaatagacatcagagaactcacactggagaaaggccttatgagtgcaatgaatgtgggaaagcctttctttgtaagtctcaccttgttcgtcaccagacaatccactctggagaaaggccttatgagtgcagtgaatgtgggaaattgtttatgtggagttccacactcattacacatcagagggttcacactggaaagaggccttatggttgcagtgaatgtgggaagttctttaagtgcaactcaaacctctttaggcattacagaattcatacaggaaaaaggtcttatggttgcagtgaatgtgggaaattctttatggaaaggtctacactcagtagacatcagagagttcacactggagaaaggccttatgagtgcaatgaatgtgggaaattcttcagcttgaaatccgtcctcattcaacaccaaagagttcacactggagaacggccttatgaatgcagtgagtgtgggaaggccttccttacaaagtcccacctcatttgtcatcagacagttcacactgcagcaaagcagtgcagtgaatgtgggaaattctttaggtataactctacacttctcagacatcagaaagtccacactggataaggcccttatgaatgcagtggatatgggaaagccttcagtcaccaacatattgtggctggacagcaggcagtacacactggagaaagactgaatgccgtgaacgtgggtaattatgtaggtacagctctccagtcgctatgtatcagagaattcacactgcagaaatgtgtgttcagcaaactcgggacattattttggtttgactctcatctcattagacattggagagtttacactgaagaagagtcttttcaataaagtagaaagtggtaaagattcaacatgcaagattgtacttattgggcttcagaatatccacactagtgaaagtcttctgagtacagcaaatgtgtgacattattttgctactactccacactacttagacatcatgtagttcacactggaaaaaggccacgtatgtgccttgaatgtagccaaaatgacgaacaacacccagaaatctgtgatttagcactgagaactagtattatatggtttttaaaaaacaatggtgaagtacatgccacataaaatttgccatcttaactattgtaatgtcttgtttaatacttgaagtacattaacattgttgagcaaagaatatcctgaactctttatcttgtaaaatgaaactctataaccaccattaaaaaaacaactcattcccacattcttcagtccctggcgaccaccatatttttaagtcattatgactctgactattcttggtacttctcagaagaagaatcttagagtgtttttcattattttttttcacttaggataatatcctcaaagttcattcattttttagcatgtgtcagaaattttaaggctgagcaatatttcattgtttgcatttaccacatttcctttatttctgacatctattcatggacacttgggttacttctacctctggctattgtgaatattgctactacaagcataagggcacaaatatctctttgagaccctgctttcaattcttattgggtaccccaaaaagtggaactgctggatcacatggtacttctaactttaattctttgatgaactgagaaacttttccataaaacttgcaccgttttacattcctaacattccacaaaagttgtgatttgtcctcattctaatccatagaaggcaacatttctaacaggtttctaggtgattttgttgttgctgatgtagggactacattttgagaactgtcctatcccatttttataacaatgcagagcttctctgtaaataccccttgtttctatgttctatcctgtgagccttttcattttgttaatttttcccagtgtttacaaccaggaaatagcttgtcatctttgatacaaaacagaaatctttgcaaaataccaattgcattctgtagcccttggatcattttctcccccaatctatgtagatatttagtggtgtataatgttgtatgagaatacatcatggtaagaatacattttaaaggactttaagtcaggtcacaaaatacagcaatttacctgtggacctgccctctacccaggccatccagtcccaatgactgtgctcttactgctgctttccaggtgtgtacctatcatggggtgtgcatgccactgaccattcctctgtgctcttactgctgctttccaggtgtgtacctatcatggggtgtgcatgccattgagcattcctcttaatgggttctaggcaacagatagaatagcttaggtgccaaagccacagaacctatcaggggttgtgtcattttgaaaattatgccaaattctaaatgatcttgtatgacagcagtcccccaacctttttggcaccaggaactggtttcatgcgagacagtttttctgtggatggcagtgcagggggctggatggtttcggaatgaaactcttccacctcagatcatcaggcattagttagattcacataaggagtgcacctaggtccctcgcatgtaacagttcacagtagggtttgtgctcctatgatgtctaatgccgccgctgatcaggaggtggagatcaggcaggaatgctcgctcctgctgtgcggcactgtgtggcctagttcctgacaggccacggactggtacggtctgtggtttaggggttggggattgctgttaaatgggatttggggaattttatttgggttctctctttgactagtctattgtcaaagttattccatctaatttttctagagtaagccaggttctgtgtcatgtaatagagccacataaacagcaaaggtgctattgtgaactgtgcatacgagggatcaagttgtgttccttatgtgaatctgagctaaaataagaaaaaaaaaaatttagcctgtgaggtcagaagcaagacagtcatgttagatttctgtcattattcatagttctgcaaaggtggtttcaggttctgcatcaactgaaacgtgctcttccatccagcagcatttaaaaccaaagatgctgtcccttaattagttaactctcacaatccattttagtaatggttcctcaggaaactgactacttcaatctataaagtaaaacaagttcttcacattatactctctggtttgaatagttacttggttttgttcttccccacaatgactaccttcttggtagccgtaggtctcagaggcattttctgttgtccctaaatgattctgcccttggtgggaggtggcttttaggctggctggtggctttcgttcagatggactgaaatctaagcttgatctagcatcaagtttggacccagcactctctaatttttttttttttagctgttatagataacaaaggattgagtaatttgctttttgcttattagcttgcattttcttatgcatccagtgaaccagagattgaatattttgctttttgcatattagtttgcattttcttatgcatccagtgtaccaactccctgggagctggatccatctctaaatttccatggtaactcttacctttagtaactgagcacagacagccacagttccataccatgtatggccatttggccactaaggaatcaaaggtttttcatcctccacccatttttaaattgaggattattcaaaagttaaagaaaaaactttattatctcttattaatatatgtaaattgtgttcaaaatagaaaatgaacttctactttttttttttttttttttgagatggagtctcactctgttgcccaggccagagtgcaatggtgcgatcttggctcacttcaacctctgcctcccgggttcaagtggttctcctgccacagccccctgagttgctgggattacaggtgtgcaccaccttgcctggctaatttttgtatttttagtagagacggggtttcaccatgttggccagactggtctcaaactcctgacctcgtgatccgcccgcctctgcctccacctcccaaagtgcttggattagaggtggagccaccgcacccagcttttttttttttttttttttgagacagagtcttgctctgttgcccaggctggagtgcagtgatgtgatctcggctcactgcaacctcagcctcctgggttcaagcaattcccctgcctcagcctcctgagtagctgggactacaggtgcgcacaaccacgcccggctaattttttatattttagtagatatggggtttcaccatattagccatgattgtctcaatctcctgaccttgtgatctgcccgccttagcatcccaaagtgccaggattacaggcatgagccactgcgcccagccgaaattctatttttatatttgtgtattgtcaatactaaagctaatttgaataaagtcttataaacaaatccatccaattttaatcaggttttgaccacacaaggtaagatttttccgtaaaccttttataccttcttacaaatttttttctatttttctctttccccaatttttagatctatttacctttgtttgagacagaatctcactctgtcacccatactggagtgcagtggtttgatcttggctcactgcaacctccacctcccaggttcaagtgattctcgtgcctcagccccccacatagctgggattacaggcacacaccaccatgtccggctaatttttgtattagtagagatgaggtttctccatgttggccaggctggtttcaaactcctggcctcaagtgattcacccacctcagcctcccaaagttctgaaattataggcttgagccactacgcccagtcctagatctatttacttttatctacattattttcctttcattttgaaacgacctttacataacccctaaactagacagaattcctttttttttctttctttcttttttttttttttttttgagagaagtctcactcttgttcctcaggcttgagtgcaatggcccgatcttggctcactgtaacctctgcctcccgggttcaaacaattctcctgcctctgtctcccaggtaactgggattaaggcacctaccatcacgcctggctaatttttgtatttttttttagtagagacgggttttcaccaagttggccaggctggtctcgaactcctgacctcagatgatctgcctgccttggcctcccaaagtgctgggattacaggcgtgagccaccacgcccggcccagaattactttttctttagcaaaaaccacatcttcattttttaaatataagcttcttcacaaaaaacacatagtaaacatcatggcactgggctgcacaatactttgatagagcacgttgatgtaaagacatttttgtaagtgtttagagcatgccttttatatctaaacatgcaaagaaatgagtagcctcctgtcgtaataaccatttactgtaaacaactgccaccagctgcttctgacactgcagctcttgcttgtgacagccattacgcacaaaaacgtcaagttctttcacaggacaaagtaatctctggtaccccccaaaaccaatgatatcaggtaatgcactacaaaagaaggcagaattttagacctgagataaatctgtcctcttaaaactcttgagtgagagagagagagagagagagagagagagggagagagatttcctcatctggttagtgtagatagcaggttggcttcctgagctggtcagtgcagtagtgggttagagttctgttttatatttggcttggccattgttgatttctatagtcaatttcttacatgtaaacaaggaagatagctataatattgagatttcttgttttcttaactggtcttaggttgaaaattgatttttcattctcctccccgctcccccctccccccaccatcccattcttctgcctctgccggatcttcagctgggtagcattttggttttgtttgttttttaacctggaggatgtccccaaatatcaaaacctaaacttctgattcttagaagtcctcccttcgatgagttgctagttttatttctgaacatgaacttaccaaaacatcccccagaaatcccctggtctcagacataactctctatgcttcccattccatggcagcaactcagcctaactcatccaaagcaaaaaagcaatcccttcttgcttaagtgacacaaggatccccagatgaacaagtagctgtatcacccttcaattaaatgtaataatatttacttctggtggaacctctccttccttggaacaaagggcccccaaccagcagaatttacaattaagaagaagtggccagacacagtggctcaagcctgtaatcccagcactttgggaggccgaggcaggcagatcataaggtcaggagttcgagaccagcctggccaacatggtgaaaccctatctctactaaagatacaaaaaattagctgtgcgtggtggtgcgtgcctgtaatcacagctactcgggaggctgaggcaggagaattgctttaacccgggaagagggggttgcagtgggctgagatcatgccattgcactccagcctgggcgacagggcaaaaaaaaaaattagccgggcatggtggcgggcgcctataatctcagctattcaggaggctgaggcagaagaatcgcttgaagccgggaggcagaggttgcagtgagctgagatcgcgccaatgcactccagcctgggtgacagagcaagattctgtctcaaaaaaaaaaaaagaaaaaaagaaaaaagaagaagggtagcagaaattctgtgaatgagttactaggttcaaaaatgaggatgctcaatataatgcataggttcagaaaaaaattacgatgaaaagaattgtcaaattttgtaactgatacttgacctggttaaatttgaattatttctaattccctatgtatatgtgcagtgagataaaagataaatattgtatgtgacatactcatcataaaattatttgttgtttatctgaaatacattctaaatcaggggtccccaacccctggggccacagatgagtactatggcctgttaggaatggggccatatagcagagggtgagtggcagatgagtgagcattgctgcctgatctccgcctcctgtcagatcggcagcagcattagattctcataggggtgcaaaccctactgtgaactgcacaagagagggatctaggttgtatgctccttatgagaatctaatgcctctgaaaccatctgcccccaaacccctctcccttatccatggaaaaattgtcttccacaaaaccggtccctggtactaaaaagcttggggatcacagttctaatgacataactctttccctgataatttgcttctacttaacaattccttgttttatataatttgcttacagaattcctgcagttacagtcttgatgccatttatgttgtgacaaaccttcgtcatttgtcatattcaacttatttcattcctttatctattggacattcattaatgagaaacacactcaacagtagcattctgagcctaaagactcatgatgataaacagtgtagaaaacattacaaactctattataattattctaccatctccatctgattttaacaaaaaagttattttgtctctttctttggaactagttgagaaaatcatgcaccttccaaagttaatatatatttgactgtccaccattttcattagtcaatgggcaattacatagagtcgaagaccttcaaagggaattttaaatactcctcagttcatcataaattataaacttgcattttgacattttttgcattcaatatactcaaaatatagacaatagcaacttctacaagagttgaaaaacattgtgggtacagtggctcatgcctgtaatcgcagcactttgggaggcctaggcggacagatcacttgaggtcaggagttcgagaccagtatggccaacatggcgaaaccccatctctaatagaaatacaaaaaattagccaggcatggtgccacgcgcctgtaatcccagctacttgggaggctgaggcatgagaatcacttgaacctgggagccagaggttgcagtgagccgagattgcgccactgcactccagctgggtgacagagtgaaactgtatcttaaaaaaaaaaaagaaaagaaagaaaaaagaaaacactggagaaaacgttggattttacaatgtatgtctgggtcagttagtctaccatttcatatccaaactcataactaattacaaacagatggaaccattgaaagcttgcaaacttttaaattatattcatataattaaaatataagtaataatttatattcaattaagaataaatggggccaggcgtggtggctcatgcctgtaatcccagcactttgggaggccgaggcaggcggatcatgaggtcaagagatcgagaccatcctggccaacatggtgaaatcccgtctctactaaaaatacaaaaaaattaactgggcgtggtggcgtgcatatgtagttccagctacttgagagtctgaggcaggagaatcacttgaaccggagaggcggaggttgcagtgagccgagatcacaccactgcactccagcccagcgacagagtgagactccgtctcaaaaaaaaaaaaaagaataaatagattttgatatctcaagggaaaaaaagtgatattcctatttgtctgcagggcagagctgtagtggtcaggcagtctcctcaaacaaagccaaaactgctattatatgagcttttaggaaggctggccttcagggactgaggactttcagaagcagcagagttgaaagactgatggactttcaggtatgttagtgtaaatgcaaccatttaccaactggctttcataaacaggattactgacaggaggcacttgtggattagttgttgccagcagcctggggctgccactgattgaccatctttagtactgggccttacccccattggaaaaattttagaatcttggcctaacaatgatttgctaagtttctggttaattactggggtgaagcttttgctgactagctgacttttaaagcataggtacacatcccaagttatctctaattaatggtggtttcttgtttatgattatggatttggggcagagataaattttttccttacttgaacataagccagcaacttaattctcattccccatttttggtttcccaacagccagaatttgtaagaaatcatatgctatggtttggatgtttgtctcttccaaagctcatgttgaaatttaatttccaatgtttgaggtggggcctaataggaggtgttctggtcatgagggtagatcctacctgaatacccccacttgaagatgtgtaaattctcactctattagttcccaagaaagctggttgttgaaaagagcctgatacactccccacccactgtcctcctctcttgcaatatgattccttcgcattatagctctctttcgttttccaccatgaatagaacccgccgaagaccctcaccagatgcagatgcccaattttaaactttccacacatcaacattttgagccaaataaacatttttttctttataaattaccagcttcaggtattcatttatagcaacgctaactggactaagacatcataagtattatctagatatttgtttgtgaggatatgattttcaactcatgttgccaatgagtaatttaacggccagttacagtctgagaaaaatgtgtctcccactggtgattctttgtaatatattacaaccagctgatatgtaggatatgtaggccattctgataagtcaatacaggattcaggaaaaatcgttatatataggtcatattcttaaactgtgcccaggtcttaattaataattagcaatgacacagaggggacactgccatcaaaagaaaagattaatgttacagttccctggaaataagaggcactgaacaccacacaggccacaagaaaccttattacatacagagactggaaagcagaaagagaaaacagagtaactggaagtatgtctttataactaaagtggcagagaatgatgaggtagagataccgtcgatgggcaggaaggaaaaacacattttagtgtttgtggttggggggttttatatgagtttcatgcacttgagtaagtggcttgcaagaaaaaaagtaaacaactttggttctattagtttgaccctgtgattaatgaatatcaaacagacaaatacagaatctaagaaaacatagaacagtcctgtatacacatagcagctgggaaacctattcccagtgtgtcccatgcacctatcattgatctgaaacccaatacatatgtgctcattgaacatttactagagaagtaaatacacattatcacacagcttctctattcatttttatctgtggcaagtctttcagtttatcatctgtacttacccctctaagcagttaatgagcaatgttttcaagtgtgtaaaaaaattacattttggaaacaaaagcatagtgtgtccaagtgtccagcagagccacaggttcaacttcattctctgacttctcagaatttgctgtctctcactcaaacattgagatcttatctttttctcacattacagatcgatttctctagggcttctggttttttttcttttggaataacctacataattactaatagatttcggtaatttttttatttcacaagtgtttttcacatttcgactccctgtgcaaatacagttgtaaacacaggtgaaattttaaatcacttctgaggaagaagataacatcatggaattccacaccttttttgaggataagatgtgcatatgcttcaactatgaaaacggtagacaatgttgtccagaaatggcatgtatcagctgctcttgagaaataaaaataaaattctaagcaccccctaactgactgaatggatgccctcttgaccatgagaaccctagaataactttggaagctgaattcaccactatagaggaacgggaaatcagacacacctcattatatcccctaccacactacaatcattaggttttcttccctaagggctaaatagaaatcaaccttttcagaagactactagcttatcttccaaggtacagaacagagagaagatgagattattcattccttcatccttctctgagacatcttctttattcccttttcccctcacgtgtttactctatcttatgtaaaatgtagatttactgggcactaactaaagtttcacatgtctgtaatcatttgtctcactgccaacccctcttcctttttaaggaaaatgtataataaatactaaacctcctaagaacctctttggaaaaaccagccacagatgcttctgtgacttacatttttctggatgtgcccttaggctggtccagtaatcctccatgatttgtgacttatgcctcaatcactcattttggtcgtcactctcattttcagataggattgtgattcttaaaataaatggaaaatatctcagatatgaagtagtaagtattattagaataaaagcgttgcacccttcgtaggaacacaatcgctgactctacagtcaggtaagatgtattctctttgatccagaggcatagcttcaccctttcaacctacttcagcgtctcctgtcatccttcctacaaattccagtccatagccctaactgcgtagtctttctttcttcttctggaccaaacatattgaagcttactaaacagacgccaaagcgtaactgtatgtgtatttgaaaagcaataatatggctggcaggcatgagtagaggcagactgcctttatggtatggggtgtctctttggacctgtagttattgggaattagctgtgcttaatagagtcttaagtaataagttgctaacatttctgtaaatatcctatactacaatccaaaaaaataccgtatgttgcctttaagagcaagccaagccccctcctgtctttggagtcggggactccgtttcccagctcccctgacagtgccactgggcctttatctgccatataaggactgatcaacgctctaagacaagtccggaagcggtgtcgaaacttcataacccagaagacactgcagctctcggcggcacgacttacccaataaaggcttagaaggggacgtttgcgtgcgtgcgcaccgtcggagggcgggacttccgccgtcctcctggtggtggtcgttttggttctgtgtggtgtttcaccaacttcggcctatggctctgtctgacgtcaccgaagtgacggaacggaaaagcgcgagaagcggctcggttcccaccacggagaggcgggagtgagtcaactgacaagcgctggggacagtggcgtccttgtcttgcctttgtcgctcccgccccgctcttccctggctgggctggcggaggccttgctgatgaacctgactgaggtgggtgtcccgtcccaggctcccccgcccgaccggtcctcccagtgctgaagccccctgaaggggccctgcaggtcaggccccttgtcccgaagagaggggcgttcctgtgtggggtccccgtatcagccgatttgatgcagcctcagagctcccgttagggacctcaggttcagagcatggaggcgctgccgagtgggctgtgttggggcgtcaggggtgtgtgttgtttctgcgggaaagagagggttttgtgaattctcgcttggaatggcaacctgagcagccagtaaccatggaaggttgtcaagggagggacagttggagggggcaggtccagagttcgaagtttcaagttaggaaaaccaggttaggaatggacacagggagacgcgaaaaggccctgaggccactgcagtagacccaggagaattatggttggggctggaccagtgacagtagagggagatgtgatgagattcttcataggcctgaaagatagggcccgtaggttttcctggtgcttcagttatgtctgaacaaaggcagtgaagaaccgtttcaagtgtttgttttgttttttgttttctgtttgaacgtttggaagaatggagttggggaagtcagcataaagagcagatttccgggagaagatcacaggttggattttggacatggtgattctcaaatgtctcaagatggatatgtcacacagacaggtggacataaaggtgtggagtctgaggaaggggattgggttggcgataccagacggatggagggcttggactgggccagagaatggtctgaggatcagattgagtaggtcggtctcgggttttttttgtttgtttgtttgcataaatttaaggagtcaagtgcagttttgttatatggatatatttgcatagtggtcaagtctgggcttttaatgtatccatcgcctgaataatgtacattgtatccattaagtaatttttcatcactcatcttcgtctcatccttctacctgtttggagtctccaatgtttgtcattccacactctttgtccatgtgtacacattattcagcttccacttgtaagtgagaacatttggtatttgactttctgtttctgagttgtttcatttaataatggcctccagttccatccacattgctgtaaaagacatagtttcatgcttttttttttttttgtggcctagtggtattaccttgtgtatatatatgccacattttctttacccagtcatacattgatggataattggttaattccctatctttgctattgtgaatagtgctgtgataaaaatacatgttttttttaatgtaatgatttattttcctttgggtagatgcccagtagtggaattggtggatttaatggcagttctattttcagttatttgaaaaatcttcatactgttttccattgaggttgtacttatttacattctcaccaacagtgtgtaacctttttctcttctccatatcctgggcaacatcagttgttttttgacatttaaatgatagccattctgactggtgtaaggagatactgtggttttaatttgaatttgtctgatgattaatgatgttgagcatttttttatatgcctgcttgcgatttatgtgtcttctttttgaaaaatgtctgccctgtgcttactgttttttttttttttttttttttgaaatggagtctcgctccgtcgcccaggctggagtgcagtggcgcgatctcggctcactgcaacctccacctcccaggttagttcaagcaattctgctgcctcagcctcccaagtagctgggattacaggtgcccaccaccacgcccagctaattttttgtatttttagtagagacggggtttcaccatgttggccaggctggtcttgaactcctgacctcaggtgatccacctgcctcggcctcccaaagtgctgggattacaggtgtgagccaccgcgcccagccctgtgcttactgttaatgagattttttgttgttgtttttttgttatgttttgtttgtttgttgttgagttctttgtaaattctggatattagtaccctgtcagatgcatagtttgcaaatatttcatcccatttttcaggttgtacatttacttggttgattagtccttttgctatacagaagctgtttagtttaattaggtcctgtctacttttgtttatgttgtttatgcttttgaagtcttattcatgaatttttttgcctagaccaatgtccagaaggggtttccctgagttttcctttagtattcttcgttcaggtcttacatttaaatctttaattcatcttgagttgatttttgtatatggcaagagaaattggtccagattcattctttttcatatggcaatccagttttcccagcacattttattgaaaagtgtgtcctttccgtagtgtgcatatttgttgcctttctcaaagatcagttggctatagatatgtggctttatttctaggaactttgttctgttccattgatctatgtgtctatttctgcagtcaaatgctttaccactgagctgtacaccttatgtgtctatttctatccattaccatgctgttttggttactaacaacttgtagtataatttgaagtcagatggacttaatttgagggaaatcttgaggttgtcatttcaggtgggctctgtgttgagagaacagggggctgagacttgggggccagaccattggtggctccacagacatcatactctgtccagaacggtgcagacctggcataacagggattctggattgcatctgtaaaaagggaggcctggactgggtaagcatatggcctgggatggaggctgaagtgtgaggtggtttcgatcctgcacctgcaggcttggttgaccctcagggccactctctgttgaacaagagaaatgttattgaggctggtggagtagctgggttccagatcagagcactgctttttccccttctctacatgtcagggctacaggggatgatctactgctccagccaaggtctcctggcaagctcactttagaagattatgtagcaggtagacctggttgcagaaaggaccagtacctgacctgcctactcttcccttctctataactcattaacttaataatgtatgaaacacttattgatttaaaccccaattagacagtatctttctaagtgtgtgcaaacagataggcagttaatagtgaagtcattatgttaaatttctaaaagtgagccgggtgtggtggctcacacctgtaatcccagcactttgggaggccgaggtgggtggatcacctgtggtcgggagttcgagaccagcctgaccaacatggagaaaccctgtctctactaaaaatacaaaattagccgggtgtggtggcgcatgcctgtaatcccagcttctcaggaggctgaggcaggcgaattgcttgaaaacaggaggcggaggttgcagtgagccaagaccacgccattgcactccagcctgggcaagaagagcaaaactctgtctcacaatagaggagaggagaggggaggggaggggagggcagaggaggggaggggggagggcaggggaggggaggggagaaagtggttcataattggtttgatgttaatttatctcgtttgctttccttggaaaaagttaatatcgcatcctctaaaatcttaagctaaaaacatacatgaaaatttcaaaaccccactctttcatttgcattgaactcatgtacaaaaccattaatcttggaccatagccgctgatatatatagtacatgctactgatgtttgatactaatatgagccctgtgagggggcagctattcttgcaatctatttacagatggagacactgaagctcaggtgggtttggttcttttccatggtcacagagctgcagcactgaggcctgaggaactttattcaatgaattgagatcagtttgctcccaggcagggcagacgaggtggtggtccatctcagcctgaaggatccttccatggctgtcaatttctcacggcctttctcttccctcagggtcccctggcgatggcagaaatggaccctacacaggtgagtagagtgtttcctactattcacccaccctggttatctcccagatggttttggcaggtgacaaaacctcttttcctgtctttctcttatgtctgaagggtgagtggtttcaccagttagtttcagtattacaagttggctgctgggttacatagactggtccccgtttttgagaattgatctgataagatatgtttgggcctcttgggcacaggattcagaatgtttcaatgtttggaggagagactgagctaggtttttagggaactgcaaatgtctgttacatctggtaggaatacggagcagaatgggaggtggctagaggcacacaaacatcaggcctggaatgacagcctaggtcctgggtctgtaatctaagggaagtgggagacggggaagatttgaagcaaaataggtagtgataggaccccagtttaagagactttctttggcttctgagtggaggacagactgtggaggtgagggtaatggaagggagatctgagaggatgttcctgcagcagtctaggtggatgttggtggtggcttgtcaagagtggtcatagcttcagttttaactagagctgcccacattttatgatacagagagtgaggcagctggggaggtgggatagaaggggaatcaggagtggccccatggtttttgtttggaagcatagatgctccatcagctaagatgggagaagtcagcagtattaggaattttcagagtgagtgtgaggagtcagtgtttgttcaagccacagatgtctcagagactcctgatggaggagttcaggttggagatgtccacactatggtggctgtcgtatggaccaggatgaagccatggattcagtttaggtgacagcatctctaggttatggtggcagtgctgttcgaagacagagaattggaatggggcatgagaactgggtctcttactgggtagctgtgcagtggtggaggagtcactagacaaatgagggaatggagtgtttgtggggatgagtgtatgtgagatggtggggtataggagtgagaaagacttctgaaggagagtggacatgatggggttgctgaggggggataatagggtgaggtcggagagttgctaactatcagttgggaggaggtgaggatgggagttgtattaatccgtttccatactgctgtaaagaactacctgagactgggtaatttatgaagaaaagaggtttaaccaactcacagttcttcaggcttaacaggaagcataactgggaggcctcaggaaacacaatcctggcggaaggtgaaggggaagcgaggcacatcttcccatgatggagcaggagagagggagagaatgaagggggaagagccaaacacttttaaacaaccagatctcgtgagaacttactattatgagaaaggcaaggggaaaatatgccctcatgatccagtcacatcccaccaggtccctcccctgacacgtggggattacaatttgacatgagatttgggtggggacacagagccaaaccatatcaggagtggaaatatggaggtcagtgcagctgggcttggaatgaggttttggtggagagcaattttcctgactgtttatgggacagagtgtaccatgaggcaggacacagctgagagtatgggaagtcctcacatggtttgggcagctgacagtgaagtgagaaacagggccgtgtagggaaccttcaacccagggcttagggctgcccccggtgctaggggactttggtgttctggggcaggactgggaatgaattggatgctgagcgtatttgccgtgcaccacctggtttccgtgtgcagagtggcctgttaggaggtgaaggaaatgcctgtggtgtgggctgggagttgtctgtggaattgactggagtggaggtgtgagagatgggattggagtgctgtccaaagagtgatgtgcaggcaggaggagtgtgaatggagggcctcaggccctggccctggtagctcaagggaggaggatgagtctgagtttggttgtcttgggaggcaagatctgggtgactccatggcaactggctggcaggagaggatggatccccccacgggaggcccacattccttttctaccttatcttccatctgtttcctctgtgtgctggacacggtggccaatgtcaatatggagagaaaagtcactcatgccacctggatgtggtttctcttccacattgggagggtgtggaagagattgagcaaggaatggaggcgtaggggacagcgatgagatcctggagagagaaatgtagcagtcattttacctattgggttttaatttatggatgtgagtgattgatgctggggacaggccaatgactgaaagaagatatttattccttgcatttccccaaggggggtacataccacataacacagggccacatggtgaggcaccagatttggtcaggaggaaaattggagtgaggggaaagtttagtttagtccacggacgctattggggtttccaagggaaagcaatgcagggctgggcgtcaggatagtttggctagtttaaataattccaggacacctgggctattgggactgtccctagttttgcagtacctggccctgggttgatttagagtacgggaaatattggcttggtttgagaatatgggcccagggtggtaggggagatggaaacacatttggctgttagtttggccctgtgtttaatgggtggtaaatataagtagaaaatagagaacttaagtaaatacagcttgaaaagaagctgcttatgtattcatctttcccaatttggcagggccgtgtggtctttgaggacgtggccatatatttctcccaggaggagtgggggcaccttgatgaggctcagagattgctgtaccgtgatgtgatgctggagaatttggcccttttgtcctcactaggtaaggccctcacacttgcccagtgtcctgggttaggctgtgttacccctttttacccaaaggcagctctgcgtttcccacagtgagaccgtgggtgctgcttcttttccctgtttcttggcatatatgctgtgggaggcagggctgggccgtgtgttttataccccctttttcctagcatccccatccctgctgctctgaggcttacaagaaagggctcaagagccagaaatgttgaatttggcatagagaccccaccagccttgtctgtccctggtcaggttactctgtccaaacacatgagacctgtgttctgttgtcccctttctctcactgatatttcttggtgccttcctgtgcttggaatttcaggcactgccctggtcactgattttggggactgctgagttgactatgcaggacgcaggactcttctgtgaagttcttacgattatagaatgtgggatgccatgggcttgatctctctgggcatgtgctctttactctttttctctttctttcccctagagagggccccaggcacctgagagggtggatattacttcaacaatggcattagaggctcagggacatggccctggtgcctgggaattgggaaaagggttgatgtcacagctggggtcaaatcaccctgggaacctgtcctgtgttcaccattgtttgttgccagggccactggccacagatttctaccttttcttccccattatcatttctagtatgactcctggcccctgcacctccaatgccccacagtctgtacttctggggccaccacccttcaaccattcttttccactgctccctttgaatgcctgccaacacgtggcctgtatttaacatggtgtgaggtctgcatgtatccctgaacacaagctcctctgtcacagtctgatctctctgggtttggagagaaccttctacacactgcttgccagtctccagcaaccatggcctgttgatggctgttttcagaggagtgagttggagaccctgccttctctctctgtaccatacccctcccttgtatgcttaccatcatcagggctctcccattatggggccttgccaggcccagccctgcatagtggaccctcctctcactggccttaatgtccatgatgtccccaatcccatggccttatttgtgtgtgtgcctgacacacatttgtgatggagctgcttcctcccaccagagtcaacatgcacttctccagcatttctgttctgacaggttcttggcatggagctgaggatgaggaggcaccttcacagcaaggtttttctgtaggagtgtcagaggttacagcttcaaagccctgtctgtccagccagaaggtccaccctagtgagacatgtggcccacccttgaaagacattctgtgcctggttgagcacaatggaattcatcctgagcaacacatatatatttgtgaggcagagctttttcagcacccaaagcagcaaattggagaaaatctttccagaggggatgattggataccttcatttgggaagaaccacagagttcacatggcagaggagatcttcacatgcatggagggctggaaggacttaccagccacctcatgccttctccagcaccagggccctcaaagcgagtggaagccatacagggacacagaggacagagaagcctttcagactggacaaaatgattacaaatgtagtgaatgtgggaaaaccttcacctgcagctattcatttgttgagcaccagaaaatccacacaggagaaaggtcttatgaatgtaacaaatgtgggaaattctttaagtacagtgccaatttcatgaaacatcagacagttcacactagtgaaaggacttatgagtgcagagaatgtggaaaatcctttatgtacaactaccgactcatgagacataagcgagttcacactggagaaaggccttatgagtgcaacacatgtgggaaattctttcggtacagctccacatttgttagacatcagagagttcacaccggagaaaggccgtatgagtgcagggaatgtgggaaattctttatggacagctccacactcattaaacatcagagagttcacaccggagaaagaccttataagtgcaatgattgtgggaaattttttaggtatatctccacactcattagacatcagagaattcacactggagaaaggccttatgagtgcagtgtatgtggggaattgtttaggtacaactccagccttgttaaacattggagaaatcacactggagaaaggccttataaatgcagtgaatgtgggaaatcatttaggtaccactgcaggctcattagacaccagagagtccacacgggagaaaggccttatgagtgcagcgaatgcgggaaattctttcgttacaactccaacctcattaaacattggagaaatcacactggagaaaggccttacgagtgcagagagtgtgggaaagcctttagccacaagcatatacttgttgagcaccagaaaatccacagtggagaaagaccttatgagtgcagcgaatgccagaaggcctttattagaaagtctcacctggttcatcaccagaaaatccacagtgaagagaggcttgtgtgctccatgaatgtggggaattctttagctaaaactccaacctcattaaacatcagagatttcacaatggagaaagtttaccattgactattgtaattgggtagtaatgttatataaattccacatttttatgcaactaatctccagaacatttttcctcttaccaagaagtaaaatgctgtacccattaacaacaactcattccccttccctacttccccagaaatgtctcaactatatttctatactctatggtacttatatgaggtaccaatagatatctatgaatttgatatatatttgtacctcatataagtggattctacagtatttatcttttgagactggcttatttcacttaggataaggtcttcacggttcacccatgttgtataatgtgtcagaatatccttcctttttaggtgaaataatattctatggtatttatataccacatttatttatccattcatctgttagtggatacttgggctacttccaccttttgcctattgaaataatgctgctatgaagatgagtgtacaagtgtctattcaagattctactttcaattcttatagggtatatactcagaaatggtggtgctggatcatataggatttctattttttttttttgtttgtttttgagacagagtcttgctctgtcacccaggctggagtgcagtgctgtgatcttggctcactgcaagctccgcctcccaggttcatgccattctcctgcctcaccctcccgagtagctgggactacaggtgcctgccaccacgcctggctaatttttttgtatttttagtagagacggggtttcaccgtgttagccaggatggtcctgatctcctgaccttgtgatctgcctgccttggcctctcaaagtgctgggattacgggcgtgagccaccgcgcctggccaggatttctatttttaatatttttgggaaaatttttccatagtacctgtgccattttacattcccaccagcagtgcacaaggattgcaatctatatacatcctcaccaacattgttcattttctatttctgtttttggggttttttgtagtgccttttgttttggatagcagctatcttgttggatgtgaggtggaatctatagtgtctttcatttttattttgtgaatgattgatgatgttgaggatcttttcatgtgcttgttaggcatttgtgtatctggaaaaatattcaagtcttttttttccatttttaatgggactatttgctttttgttgttgagttgtagttctttatacattctggatattaactccttaccaaatatatgctttttacatattacctcccagtccataggttgctttttcgctctgttgattgtgtcctttgatgaaattttaagttttgatgtactgttgactctttctgtctgtgggttctgtattcatggatcgaagcaaccatggatcaaaagtatttggagcatccatggattgcagtgatcattaatcaaaaatatttggaaaacaaaaagggtagttgcatctgtactaaacatgaacagacattttttcttgtcattattccctaaactatatagtataataaatatttacatagcatttacattgtattagaagttataaataacctaatgataatctatataggaagatgtgtgtaggttatattcaaacactatgcctttttatgtgagggacctcttgagcatcagatgattttggtatccacaaggggtcctggaatcagtcccccacagacaccaagggatgactgtagtgcattttatctatttttacttctgttacctgggcttttgatgttatatattaaaaaaaattagtatcaaatccaatgccaagcattttccctatgctttattctaagaattttatatttgaaggtcttacatttaggtcttttttttttttttcttttggaggcagagtcttgctctgtcacccagcctggagtgcagtagtggaatctcagctcactacaacctccgcctcctgggttcgagccatcaccccacctcagcctcccaagtagcttggattacaagtgtacaccaccacacctggctaatttttgtatttttagtagagatggggttttgccatgttggccaggctggtcttaaacttctggccttaagtgatccccctgcctcggcctcccaaattgctgagattacaggcaggagttgtaatgcactgtgcctggctacatttagatctttaatctacttggggttcatttttgcatatggtttaaggcaaaagtccactttatgtggctatccagttttccaagcaccattttttgaaaagagcatctttcctctgttgagtagtcttggcacacttgtcaaaatcatttgtccatatatgccatggtttatatgtggattctctattttattggtcatatgtctgtctttatgtcagtaccacacattttaggtgtgtgtgtgtgagactcagtgttgaggacaaggctagtgggctttcacactccagactgctgtattccagcccaaattactcaaattagccaatccatggggaacatggaaaacgtagctaatgcaatccgcttgccttacctaagttgtcccctgcagcctcaggttgctgttactgtgtttcagatgcaaccctctgtgggaccctacccaagttctctcattcttagctataggtaataaattgttctgattttgtgtatccaagtgacattgggttgtttcttgctatcagaagaacccagaaaagtattatgaatctagtgaatgttggaaaatctttagccattagcataacctcatttcgtgccagcatgttcaccctagagaaaagtagaagtgaaggcaatgtcatctttccttgttaacatgataactcagtagagcaatgctttggagattagctttttagggagagagccagcagttgagcctcctgcatctgaacatccacactagggatattgtctgtactgccagatatatgggaagattttgtgaactgtgttgcagttttcaacttgactggggcctttcccagagttatgcccctgccagtgcctatttaaaaatgtcatctcttttctaccaactggcaaagagccatggtgtgtagcattttagtcacattaaaatgcagttatggcagcatgctgtgttctctatctgaagaattcactagtcacttgaacactttggagtcctcacccccctcctatgattgattagggcatagacatcagccttggacagaagacatggactggctttggcaggcagattgcagaaatttcctttctccaggggaaagtattggttatctcattgatagtggtaggaggcagatacattgctaggcagactaaggacgggtccctggtgaaacccaaacttcaagccaacgacagtttaaagcctgaaaattgagctgccagttccaagtagagtccatgactggagtgagaacttcctcaatgccttttagccaatcaaatggtgctttttccaggcccacccatggaccaatcagtatgcagtctccattctgagcccataaaaaccctgggcccagctacacattgggctacccactttcaggtcccctcttgttgagagcttttctgccactcaataaagttccctgccttgctcactctctggtgtccacataacatcattcttcttggtcatgggacaagaactcggaaactgccaaatggcgggtgtgaaaggagctgtaacactgtagccctcctgccttccaccagccccaggcagccaccccatgtgacaggaagcagcggcagcagggccaggccagcccatgagccatgggctggagcagggtggcaggaccaaacaagctgtgacacacccccattcactgaagtgtgtggatggtgggaacagacaagctgtaacacaaatgagctgtaatgcttccttggggctcagaccttgggattccctgagcaaaagctgtaacaccccttggggctctgtggttgctggcgtctctgagtttttgggcgctgccatgtcccccttgtccagataccagcttccaaggcagaagccggtcgcagcacgcctggaccagctgtaggccaagcacagagccatggtgggcacaggatccggctggtaacatgagccaagcacagcctgtcggactgagttagttgagtgagtccagcaggccaagtgatgtctgggcagaagtgcttcagccatggaggtttctgcctggtgaagtggcactgaaagtatcttgtgtcatcatgacacttgggatggaattttccaacctgccagtcacccacactgtgaactccttctcacccctaatgcacacacataccctggttggttttgtgataataaaggtcacattgtttaagctaccttaactcttggaaatctagtcaccgtatgcagtgggttttgaacagaattggtctctgctagaataaaagcatgaatggttttttgtgggacctttactttgtgagctccagagggactagtaggaagcaaaagatcagctcgtatgcagatttgggccaatttgcattgccatgagaagcctcctgggaaagtctgaaggacttctgcacaaaatttcaagccctgagtacaaagattatttgtattcagaaaagtacaatttgaggagaaaacagttgccttgatgtttaaggcattgggcaacagtatgcattgggtatccctacccatatttcccatatttcccctgcattgatgagggatagctgtttcttgtgacctgctggaagctatgggtcctgaagtaaaacactatctaggtatatgttcctggctgttgacctttagggctagatggaagccatattcttttttttttttttttttcttgagacgtagtctcgctctgttgcccaggctggagtgcagtgggatgatctcagctcactgcaacctcgcttcctgggttcaaacaattatcctgcctcagccttccgagtagctgggactataggtgcacgccaccacacccggctaatttttgtatttttattagagatggggtttcaccatattatattggccaggctagtctcaaactcctgacctcgtgatccgcccacctcagcctcccaaagtgccaggattacaggagtgagccactgcacctggccagaagccatattctataataaatagtggttggattaataggacatgggagagactgcagtagagtggatgagtcccctctaaaggagcactcacaaatgccctggtagctatggctgtgtggggtggggtattacaggaattccaaagacctaaggagctgtgtacctcctgtagccaaggtcaatgtcagaacaactaaatcaatgattttatgaattcctgtagcctccctggactataaatttcaaaccatagttgcatcatctacatagtgatgggccttgagccttccctaaagataaaaagcctacatagcccgtgctgccccatcacctgtgtgtcggaacatcttccttgtttcaagctacatgagtgcttttttattctgttgaagtgtgtcatgtcatgcctggtgaattaataaatctgtcctctgcaactgacagggttcttccactgtgaaacaagagggttgtatataggttgcgtttaactaacagagttaattaaacctttttactttaaaaattactcagtcttgggccaggcgcggtggctcacgcctgtaatcccagcactttgggaggccgaggcaggcggatcacgatgtcaggagatcgagaccatcctggctaacacagtgaaaccccgtctctactaaaaatacaaaaattagctgggcgtggtggcaggcacctgtaatcccagctactcaggaggctgaggcaggagaatcacttgagcccaggagttggagattgtggcgagccgagattgcgccattgcactacagcctgggcaacaagagtgaaactccatcttttttttttttttttttttttttgacacagagtcttgcactgtcacccaggctggagtgcagtggtgtgatctcagctcactgcaagctctgcctcccaggttcacaccattctcctgcctcagcctcccgagtagctgggactacaggtgtccgccacgacgcccagctaagtttttgtatttttagtagagacggggtttcaccgtgttaaccaggatggtctcgatctcctgacctcatgatctgcccgcctcggcctcccaaagtgctgggattacaggcatgaaccactgtgcctggccactccatcttaaacaaatttaaaaaatagtttatctctctattttttaatttactgttgtttgtgggggttttgaagatgtatcaatgattttggttgagtagggcactttagctttacttctgagtgcatgcagcagtaaagttttttttttatgatttccttggctttaaacagttcaagtggttttctcaagtgtgttagggtgcacactgttagttattagtggaggttttggtaaagttgtgctgggaacagaatgccagatgagcttgtcttcaggcttcagcagtactggtggtgagctatgtatgtttatccttgtactttgcggtgctgaatgttggtacctgtgttggcagttctaggcaggccgattcttgggcctctggttggctttcttagatgctggttgtgatagcagtgtaccaagcatgtgagtgcactcttgagcccctgggctgctggtgtggcatccgtgatggtggtggcagtggtgcgaaactcttctgggtcgcacttgctgtgctcattagcagtggttgcagcgggctctgtgggccagccactagaccagcagatggcgcttgtaggcaggagatggctgaagtgggtgcagtagggtatttaggcctaacctcagcgccctaggagtgctcaggtgtttcacttggtggactaggttgtgcaatctctgggggattttaaaagtttattttgcaattgagaatgggatgtttagaatttttgtctcctactgattaaaggtagagtatggggaaaaaaacaggcaaaactaggagtttaaagaaaaggagagagaagaaaaagaaatgaagatacaataatacagaaagaacagagggaaaaactttatttatatttaatacctatgatgtgacatgcccggagttaggagcattcataagcaccatctcatattatcctccaactaagctactcatgtcagaaaaaattaaaattaacaaaggtcaacagggagtaagaaatagaaaatggaaaggaaacaattttggagtgagacctacaaaatgatctcagaatttaccctctgataagtctttctttgatcccagagtgcacaaaatgttacatgaaaaaacaaattaatataattacatctaaatttcaagctttctatttcataaagattatgagtcaaaactgagtgagttcagggactcagagaagacatttaaaatatctaaatgtgcccagttttacggttttaggcatgcgagttttagatttttttgcttttttattgagacagggtctctttcacctaggatggagtgtagtggcgtgatcttcactcacagtagcctccacctctcaggttcaagcaatcctcccattcagcctccccagtagctgggactacaagtgcgcactaccatgcttggctaatttttaacttttttggtagagacggggatctcactatactgcccaggctggtctcgaactcctagactcaaatgatccttccacctccacctttcaaagtactgggattacaggcatgagccactgtgcccagccaaagtttcagattcttcttaaaggaataaagtcagagatcttagaaatgaactaaagcacgagcatacaataaacaagagagaaaaatcagatggttatcaagaatatgaatggatattcaaactcggtgtcagagaaatgcaaattagatattattgcatgttactttaagttctataaattactatactatggaaagaaatatggggtgatgtagctgcaatcatgtatatttcatggaagagtcaaagactgtagcagtttcataaagcaatctgcacaggtactgtaaaaaaaatgattttctagaatatcatgtgacacagaaagcctgtttctggtatatctctcagtcaagtccataaattcttatgtgagagaagttttctcacaatactgttcaaggcagcagggacatggagacaatatgttgtagcattaagtgtaagaggaggaccaaagacatctatgagtgaagtagaagactgaatgtccacactaaagtacaacagggcagttactagcatttaagtagactttgacacaggagtatatatacatattaaacacacattttgagtaccaacaaagggagaaagaagtctatagtacagtacaattaaactacacaaaaagtaacagtgctcctctttctaaaacacatgtaaatacaaaaacacacaacagacctttagaattgttgtctacaagtggtggggtgatgaagtgtgaggaacaggaatgagtggaaacacgtcggaacattgaacaagacgaggtccttgtggggacataaggagagaatgtccactcactgtccagagcctcctgggccattgtcaccatacagccgctcattacatgaaagtggaatttcaaaaggtagcgaaacacctaataaaatatgttgaaagggctgggcatggtggctcatgcctgtaatcccagcactttgggaggccaagccgggtggatcatgaggtcaggagttcaagaccagcctggccaacatggtgaaaccctgtctctactaaaaatacaaaaattagccaggtgtggtggtgcacacctgtagtcccagctactcgggagctgaggcaggagaattgcttgaacccaggaggcagaggttgcagtgagctgagatcgtgtgactgcactccagcctgggcaacagagcgagactctctctctctccctctctccatatatatatatatatatacatacacatacacaaagatatgtggcctgtcaccaagtgttagatggatgtttgggccaggcgaggtggctcatgcctgtaatcccagcactttgggaggctgaggcgggtggatcacctgaggccaggagttcaagaccagcctggccaacatggtgaaaccccgtctctactaaaagtacaaaaatcagccaggcgtggtggccatgcctgtaatcccagctactcaggaggctgaggcaggagaatcgcctgaacctgggaggcagaggttgccgtgagccgagatcgtgccattgcactccagcctgggcgacagagagagactctatctcaaaaaaagaaaaaaaaagtttgtttagtttctgttggtaaatatctagaaatagaattgtaggatggtagggatgtattgttggtaaatgattaacatgtttttaattttcagttttttcagagacggggatctcactatattgcccaaactggttttgaacttatgaactcaagtaatcctcccgtcttaacttccatgtagctggcactactgaacagctttaactcttccagaccttcagttgggtggttttttcttttcctttcgtttccttctttctctctccttccttccttctttttgtaatttgataaaccaaatttcaagactttggccaaaaaacagtcttctcctttactgaatatctcagtgctccattttatttttccctcaccaattctgcaggagagatcacaagactatgtccatatctttatttgtgggggtatgattttcagctaacatagctgctaagtgatttaatttacaattatagtggtagaaaaatagctctaacttctgaggttttgtaatttattgtaaaaagcggaatacaggacatttaaagtgacctgacaaggtcaatacaggactgaggactaattcattaaatacgtcttacgtgtcttagaggaccacagacagctagcaaccctactcctaatgtgtcccatgcacttagtattgtacctggcatcgaatgagtgttcatcaaatatgttagagtaataaatacgacagcacagtttccctattcagctttacttttctggtaactcttttaatatatagtctttacctctcccttcaagctgttaatgcacaatgttttcaagtttgaaaaagaatcagattttggacaccaaacttgagtgtgtccaaggttccaggacaaccttagcttttttcctcctatcacaaatatgtttctctataactatttttgccactttctttggatatctacataatcgtcattaatagtttcagtaatagccatttcacaagagttattcagagacaatttcaactccctgtgcagacactgttgatacaatttcaggcgaaatgataaatcactttccactaatgagatgagatcatgcattcccaaacctttatctcaggagtaagatgctttctttgcacaagggctttgactggtggaaggccacactattctggcagataatggtagataagtcgcttttccttttcagttaggtttcagtctcttaaaataagtggaaaatatctcagatataaagtaataagtatcatgtgaataaagtgttgctgggtaggctgaaagacaataactgattattcagaaaggaaagatattactcctcaaactccccatcatgccatgtctgggtcttttcaatgtgcccagcagagcacattgaagatcataaaacagtctccagagcttcgttctgtgtgtatttggcaagcacaaaagagctgaccgctatgcgtggaagaccagttctttatggttggccatgttccttcggatgttcgtcttttgggaacttgctgtgctttacagaatctgaaaggacaggtctctgaaacatttctctgacttgttctagactgccttccgggaaaatctggatgcttgccgtttaaaagccaatgaagcccctccacgtccttggagccccgcaactgcatttctcaaagcctcaggaggatcctcctggctttcatcctgaacgcgagttaacttaagttcagaagcggggcaggcagtggcctgggaactacattacccaaaagacacagcggcggacacaagcagcgagtgtagccaatgaaggcctagcagagcggcgtctacgggggttcgcaatgcgtgtgggcgggacttcctgcaacgcctcctggggttgtcaatatggctgcgttgggatctgttcaccttcaggctgagtcgagactgaggtgaaaaagcggaaaaacgcgagaaaaggtttccccgttgtacagaggctagagtgaggctcggttgaatcggttgcaggcgttggtgcctctgtcagcgtccaggtcactgccgctcccgccccgctcttccctggctgtgctggcggaggctgcgccgatgaacctgactgaggtgggtgccgcgtcccagggcgccccgcccgatccctcctccgagtgccgaagccccgaggaggggccctgcaggtcaggcccctgtgtcccaaagagaggagcgttcttgtgtggggtaccggtgtccgcggtgctgtgaggcgggggagctcctgtcagggacctgcacgtgcgaggcttagaggtgctgcagagcgggcggcactggggagcccgagcgtctttgtctccacggagctgagggtgaggcggagtctcgcctgggagggcagcggagctgctgaaagccgtagaaggctgtgcaggaagggttatgcccagaggtagacgtttaaagttgggaaaaacaggatgttaaaccaggacaaggggaccgctgaggagaccccttgagttatggtagggatgggccagaggggttgcagtagaggggaagtgtgatgagattctggatggatctcagagatagagtcgacaggatttcctgctgcatcaaatgtagcagtgagggtagtgaagggtctattccatggattttgttttggcctgaaaatctgaaagaatggagttggagaagtcagcttagggagcaggtttcagagaggattatgagttgcattttggagggctgagttttggagggcagatcatgggtgggtccataagcctgacgctacctttagaaaggcgcagacctgtcataggagggattctggctcatatctgcaaaaacggagttctgaatgggttaaggaactggcctaggctggagactgaggtgtgaggtggtttagatttctgcacctgcagacccagcagccccccaggcccactctgtggaacaataggaaggtcatccagactagtggggacattgggtccagacgggggtagggctttctcacatctagtcaagggcctccagcaagcttccagcaactgaatttgtagcaggcaggcctggttgctgatgggaccagtaactgacctgcttgcttatcccctccctgcaacttatttatttatgaatgtgtaaaacattttttttttttttgagacagagtctcgctccatcgcccaggttggagtgcagtggcgcgatctcggctcactgcaagctccgcctcccgagttcaagcaattctcctgcctcagcctcccgagtagctgggactacaagtgcccgccaccacgccaggctaattttttgcatttttagtagagacggggtttcaccgtgttagctagtatggtctctatctcctgacctcatgatctgcacgcctcagcctcccaaagtgctgggattacaggcatgagccaccgcgcccggccgaatgtataaaacatttatttaaccactaatgaaccagtatccttctaaatatgtacacataggtcggcagttagaaatgaatgtaaccaatagttaaatttattcacttaataattgttgaatgttgatttttcttttttctttttttttttgagacggagtctcgctctgtcgccaggctggagtgcagtggcgtggtctcggctcactgcaacctctgcctcccgggttcaagcgattctcctacctcagcctcccgagtagctgggattacagacatgcgccaccatgcccatctaatttttgtatttttgatagagacagggtttcaccatggttggccaggatggtcttgatctctgcacctcgtgatccgcccacctcggcctcccaaagtgctgggattagaggcttgagccaccatgcccggctgaatgttaatttttctatttgcttgcaatggaaagttttatgtatcacatttccttaacaccgtaagaagtgggaaaaatacacacccaaaatttcaaaacccttccatgtcatttgtaccgaaaacatgtaaaaaatatttaatccagtagaaagaaattgctgatacatagtgtgtactacttatatttgatgcccatataagccctattagttggcaatccttttaatctctattttacacataagggcaccgagacttaaggaagttcagtcctcatcaagacactgaaccctgaggacttactgtgtaccctcagataactttgctctagttgcagggccagaggtggttgtacagtcagcctgtaggatgctgcaatgctgtcttaatcctcatggcctgcctcttcccacagggttcatagcagtggcagcaatgcttatggatgctggacaggtgagtggagagtgtttccagctttcacccatcccagatggtttcagcatgctgatatagggaatggtgttatcctgagactgttcaccttttcttctctctcccttgggtccaaggagagcctgtagttccaccagacctgggttccaaactcagtgcctggttatatagagtggttctagttctcacaactgatggtttgagatttggcaaggcatctcaaacacaggatctagaatgttcaaatgcttggtggtgagacttagatgggatgcttagagaactgtagcttaatgttctagctggcaaggataaggagcacagcagcagggcaggaggtcggggcatgcagggatcaggcatggaatggcagcctgaggttgtctaggtttttgtttttgttttgttttgtttttgagacagaatcttgctctgtctccaggctggagtgcagtggcgcgatctcagctcactacaacctccgccttcctggttcaagcgattctcctgccccggcctcccgagtagctgggattataggcacccgccaccatgcccggctaatttttgtattttttagtagagatggggtttcaccatgttggccaggatgttctcaatctcttgacctcgtgatctgcctgcctcggccctcccaaggtgctgggattacaggcttgagccaccacacctggccttgtttttttttttttttccagacagaggctaactctgtcgcccaggcgggagtgcattgatgtgatctcggatcattgcgacctctgtctcccaggttcaagcaattctcctgcctcagccttccaagtagctgggattacaggcatgaaccaacacacccagctaatttttgtatttttagtagagacaggatttcaccatgttggccaggctggtctcgaactcctggcctcaagtgatctgcctgcctcagcctcccaaagtgctgggattacaggtatgagccaccgtgcccagtggttctaggtctttaatctgaggggggtagtagctagggaaggtttgagaaagaaaaaagaggtgatttgacctagattctttttttttttttttgagacggagtctccctctgtcgcccaggccagagtgcagtggcgtgaactcggctcactgcaagcttcgcttcctgggttcacgccattctcctgcctcagcctcccaagtagctgggattacaggcacctgccatcatgcccggctaacttttttttgtattttttagtagagccagggtttcaccgtgttaggatggtctcgatctcctgacctcatgatctgcccgcctcagcctcccaaagtgctggaattacaggcctgagccactgcacccagccagatttgacctagattctaagaggcttcctctgcctgcagaatggaggacagagtgagagttagggaagaaccaaggatacctgggtgataattcctgccacagtccagtggaggttggtggtggctggacacgagtggcggctgtggaggtgggaggggtgggtggcttctgtaggttttgatctagagctgctcacattttttgatgtacagagcgaggaagctcgggaggtaggatgcaagagggagtcaggaatggccccattgttttggccttgttgagaaggttggatgttccagcaactaagatgtggtaaattttgtagtagggggagtttaatagagcatatgaagaacgaggtttgggctaagtcaaaaatgttccagagactcgagtagaggtgccagactggcagttgaacacacaggaatggagttcaatggaggtgttcaggatggagacatctactatatgatagccagcgtgtacaccatggtaaatctgtgggtcagatttaggaatagacatctttagattctggaggcaatgctgttagggagaaggaaggggaaggaaggggctgaggactggatctttctgttgggcacctggatggggttgctgggcatcacaaagacagatgagggagtggatggactgaggatatgtgtgtgtgtatttgtgtgtttatgttggagatggcctttggaaaataaaggcttttgagggggagagtgcacataaaagttggatggtgaggcatctccacaaaagaggtgagatgatagtgaggtctgggaggggcttagtaccctattatggactcaacagggttttgtggcaaatattggttgtacctgggtagtttcacgcgaactctgagactattttggcagaagatgggatcatctagaagcattgctagtcctggggtggggatggtgttggggaggtcagtgtatctgggctttggattagagttgggggatagagaaagtcgtgactgcttatgggacaacatatacatgtagaagggggagacagccaagatctggaactcaaaggaggtgtgcaagaatatgtgggtttggaaagctgaggtcaaagaaagaaacaggattgggttgggagacgttcaaagcaatgtttcctaaacattgcattctggtcattctaggggcaaatacgattctggttgcatttgtcatgcactgcaggatttcatgtgcagagtggcatggtaacacgccatggaaatactcccagttgggctgtggtggttgttagtgttgccaagagtggaggtgttggatacatgagggaggtgccatccaaagcctgagtggaggagcatgaatagatggttccacctctggcactgggcacttaagggaggagggtgagtccaagtttggttatctgagaggcaagatctgggtgactctagggaaattgagtgacaaaagaaaggtaggcccccatgtgccaggtgttttttttgttttgttttgttttttgagatggagtctagctctgttgcccaggatggagtgcagtggcgcgatctcggctcactgcaacctctgcctcccaggttcaagcagtactctgcctcagcctcccgagtagctgggattacaggtgcctgccaccatgcccggctaatttttgtatttttagtagagatggggttttactatcttggccaggcaggtcttgaactcctaaccttgtgatctacctgcctcagcctcccaaagtgctgggattagaggcatgagccaccatgcccggccatgtgccaggttttgatggcgcttttcagtctctttcccccacccatctttgttctatactggagtcagtgatcagtggcaatgaggggagagcaggtacaggtgccatgaagacctagtgtctcttcctccttcagaagtgggtggaggctagcagggtgtggatgtgtgtgggtgtggtgaggagcactgaaggtcctggagagggaagtgtatcagtgattgtacccacaggatttcaatctgtgaacaagagtgagtgattacagaaaagccaatgacattgaaataattttttttttcaattggtgagaaatcatacctggatgaaatgatttttattcctttcatttcctgagtgcagggagcatgccacatcacataaagccacagaggaaatagcggatttggtcaggtggcagatgcacagttgaagggagagcatatatcagtggctttattggggttttggctggaaaggcatgcaggggagagtgaagagcttaagactgggtagtttgcatgattttggcagccttggggtatagggactatccctccttttgtggtacaagccttgtgttgatttagggcaggagaaagaatcatgtgtgattgttagataggaggcagttcagtctatgggatctggattataagagaaatgttaaaatgctggttgttattttggtcctctaattcttagatttcaagtagataaatacagatctaaggaaacagaataagaagttgctcatgggccgggcgtggtggctcatgcctgtaatcccagcaatttgggaggccaaggcaggcagttcacgaggtcaggagttctagaccagcctgaacaacatggtgaaaccccatctctactaaaaatacaaaaattagccagtcatggtggcacgcgcctgtaatcccagctactcaggaggctgaggcaggagaatcacttgaatccgggaggcggagcttgcagtgagccgagatcacaccactgcactccagcctggcaacagagcgagactccatctcaaaaaaaaaaaaaaaaagaaagaaaaaaaaagttgctcacagactaaactgttataattttggcaggattatatggtttttgaggacgtggccatacatttctcccaggaggagtggggaattcttaatgacgttcagagacacctgcacagcgatgtgatgctggagaactttgcacttttgtcctcagtaggtaaggccctgacacctacgtcagtgtcttgtgctgggcaatgttttttcacttttttccttggcatctccgtctcacaccaggtcatggatgctgcatcctctcctggtttcctggcatatgtgttgtggcagctacagctgggctgtgtgatctgtatcaattttccttaagaagcttagctcttgtcactctgaagccttataaggctcaaaagtcagaagtcctcaggtttctcaagaatatcctaatgaccttgcctgtccctggttagtttactctgtccaaatgcatgacactttctctgtgcaaggctttctccattcttcttgctgacatagggataccctgtgtcaggaatttcagggacctacctcgtcactgcttgtgaggactgtgggcttatttctgcaggactctccactagaagttctggtaactttagaatacagcatgtcctgggtttattgctctgtgtacatgctgttgacaccctccctttccctgtctttcccctagcttggctaacgccacacctagatagttgctcaccttgagcaaggtagaggtccctgggtgcctgacagagtggacattactccattgaaggcaagagatgctcaaaaggacttggccctggtggatgggagctcagaaggggtgtgatgacagggctgggttcacatcacactgggaatcaatccagtttgatgcccctgccagtggccacaccgcatgtctctcttttcttccctattgtgatctctcttttgactttcatctcctggctcccacctctgaccctacgtctctggcctccacctctcacctgttcccgttttttgttttttttttgtttttgtttttgtttttgagatggagtttcgctcttgcaatggtgcgcgcgatcttgactcactgcaacctctgcttcccgggttcaagcgattcttctgcctcagcatcccaaatagctgggattacaggcatgcgccaccacacctggctaattttgtatttttagtagagacggtgtttctccatgttggtcaggctggtctcgaactcctgacctcagctgatccgcctgccttggcctcccaaagttctgggattataggtgtgagccactgcacccagccacctgttccttttactgttccctttgtagtgccctcaacatatgacctgtacttaaggtgttgtgaggtctggatgtatatatttcagcagtccctgaacaccagctctactgtcacatcagatctctctgggtctggacacagtcttctacacattgttcaccagaagctatggcctgttgaaagccattcactgaggagtaacttggggactccacttctgtgctctgcactgtaccactccctatgttgttccccatcatcaggactctttcgttatgggtttctgtcagtcccggttctgcccagtaggctttcctctcactggctttaatgtcccatgcctgtcaccaatcccatggtcttatttgtgagttggtctgacagacatttgttatggggctgcctcttccctccaaagtcatcatgcacttcatgagcatttctgttttaggttgttggcatggagccaaggatgaggaggcaccttccaagcaatgtgtttctgtaggagtgtcacaggtcacaactttaaagccagctttgtccacccagaaggcccagccctgtgagacatgtagctcacttctgaaggacattctacacctggctgagcatgacggaacacaccccaagcgtacagccaagctttacctgcaccaaaaggagcatcttagagagaagctcaccagaagtgatgaagggaggccttcgtttgtgaatgacagtgttcacctggcaaagaggaacctcacatgcatgcagggtggcaaggattttactggtgattcagatcttcaacaacaggctcttcacagtgggtggaagccacacagggacactcatggtgtggaggcctttcaaagtggacagaataattacagctgcacccaatgtgggaaagacttttgccaccaacatacactgtttgagcaccagaaaatccacacagaggaaaggccttatgagtgcagtgaatgtggcaaattgtttaggtacaactccgaccttattaaacatcagcgaaatcatactggagaaaggccttataagtgtagtgaatgtggaaaagccttcagcctcaaatacaatgttgttcaacaccagaaaattcacactggagaaaggccttatgagtgcagtgaatgtgggaaagcttttcttagaaagtctcacctacttcagcaccagaggattcacaccaggccaaggccttatgtgtgtagtgaatgtgggaaggccttccttacacaggctcaccttgttggtcaccagaaaattcatactggagaacggccttatggatgcaatgaatgtgggaaatactttatgtacagttcagcactcattagacatcagaaagttcacactggagaaaggcctttttattgctgtgaatgtgggaaattctttatggacagctgcacactcattattcaccagagagttcatactggagaaaaaccttatgaatgcaacgaatgtgggaaattctttagataccgttccacactcattagacatcagaaagttcacactggagaaaagccttatgagtgtagtgaatgtgggaagttctttatggacacttccacactcattattcatcagagagttcatactggagaaaagccttatgaatgcaacaaatgtgggaaattctttaggtattgcttcacactgaatagacatcagagagttcactctggagagaggccttatgaatgcagtgaatgtggcaaattctttgtggacagctgtacactgaagagtcatcagagagttcacactggagaaagaccttttgaatgcagcatttgtgggaaatcctttagatgtcgctccacacttgatacacatcagagaattcacactggtgaaaggccttatgagtgtagtgaatgtgggaaattctttaggcacaactcaaatcatattagacatcggagaaatcactttggagaaaggtcttttgagtgcactgagtgtgggagagtttttagccaaaattcccacctcattcggcaccaaaaagttcacactagggaaagaacttacaaatgcagcaaatgtgggaaattttttatggacagctccacactcattagtcatgagagagttcatactggagaaaagccttatgagtgcagtgaatgtgggaaagtctttagatacaactccagcctcattaaacatcggagaattcacactggagagagaccttatcagtgcagtgaatgtggaagagtctttaaccaaaattctcatctcattcagcaccagaaagttcacaccagataaagaatgtatatataaagcagatggggaaagacttcacacagaaatctactctgatttagcactgggacctacgttttaaaaaaagtattcttgtagaatacagataacataaaatctaacatcttaaccatgttaaagtgtatagttcagtactgttaagtcattcacattgtgcaatgaatatctagaagtcttttcaacttatgaaactaagtctataccttttaaaaccttattcctcactccatccagcctcttgacaagcaccgctctgtatgaattttactagtccgggtacctcatataagaaaacttaagttttggtcttcttgtggtttattttgtggcttattttgcttaacgttatatttttaaggtttcatgttctaatccattagaatttccatcctttttaaaggctgaataaaattctgttagtcatgtgttgcttaacagtggggaagtgtcctgagaaaagtgttattaggtgattttctttctttttttggtggtgggggggttgcgtgaatgcctaggctgtatggtatatcctatagcaccttgctacaaacttgtatagcatattactgtactgaatactgtaggctgttggaacacatggtaagtaattgtttttaagtatatctaaacagaaaaggtacagtaaaaatacagtataaaagaaaaaatgatagactcacagagaacttaccatgaatgaagcttacagtactgcaagttgctctaggtgagtcagtgagtggtaagtgaatgtgaaggcctaggttgttactgtgctgtagactttatagacattgtgtacttagacgacaatacatttttatttttattattatttttgagacagaatcttgctctgttgcccagactagagtgcagtggtgcaatcttggcttcctgcaacctcctccacctcctggttcaagcagttctgcctcagcttcccaagtgtctgggattacaggcatgcaccaccatgccccgctaatttttgtatttttagtagagaacggggtcttaccatgttggccaggctggtctcaaactcccgacctcaagtgagccactcgctttggcctcccaaagtgctgggattacaggcatgagccaccgtgcccggctggacaaaattaaatttatagaaatttttctttaatatattaaccttagctgaccattttttactttataagcttgtatttttaaaaactttttgacttttgtaataatgttttgcttaaaacattgtacaactgtacaaaaatattttttatatcctaacttcttaaattttttttgttaaaaactaagatacacacatttgtctaggccggcacaggatcaggataatgtcattttattccaccttcacaacctgttccagaagatcttctgggacagtaacacacatggagctgtcatctaaaataacaatgcctttttctggaatacctcctgaaggacctgcccgaggctgtgttacagtttgtgtgtatgtacacctgtatatttatagacatacacacaactccatatatactctactgttggagaacacctaatgataaaaagtgtagtatgctaagaacataagctagtaactcgtaagttttatctactgtacattattgtatatgttatacttctatatgactggcctcacagtaggtttgtttataccagcatcaccatgaatatgtgattaatatattgccttactactgctatcatgtcattaggcaataagcatttttcagcttcattgtaattttatggaaccactgtcatgaatgtggcccattgttgactgaaaagtgaggtgcatgattatatatgtatgtgccacttttcctttcattagtggacatttgggttgtttccactcagctgttgttaatagcagatgagcatgaatgtacaaatgtttctttgaggctgtgctttaaattccttttgaggatttactcagaagtagaattggtgctttctatgttttttttttgtttgtttgtttgtttgtttgttttttgagacgggagtctcgctctgtcgccaggctggagtacagtggcctgatctcagctcactgcagcctctgcctccggggttcaagcagttctcctgcctcagcctcccaagtagctgggactacaggcatgcaccaccatgcccagataatttttgtatgtttagttgagacggggtttcaccgtgttggcaaggatggtctcaatctcgacctcatgatccactcacctgtccccctatgttcatttaaaaaatatttttaattttttaaatttctgactcacaatgttcccattctatgttaattctgttttaaaatttttgaggactcttctatagcagctgcatcattttttaatttaactttattattaatttttttttttagtagttttactgggttgagttttttttttttctttagggttatttggttttgagatgtaggagttttttagtatatgtggggacttcagaaagtttgtggaaacatgaaagtaaaggatacaaaaagaaaacaagttttatttctcaacataagctccatcaagttcaagacaattttataagtgatgataccaggcatttagtccatccctaaagaagtgaggttcctgggaatttaaccttgtctatgcaatcttttttaatattaactaaagaaaaatgggtgccctttaaagattttttaaaagtaggaaacaagaagtcagaaggagccaaatccggactgtaaggtggatgccttagggttatcagaattcttgtaaagttgcagttatttgatgagaggaatgagcaggagcattgaagtgaaggactcctggtgaagctttcccatgggttttctgctaaagctttagctaactttctcaaaacactctcattgcgggcgccgtggctcacgtctgtaatcccagcaatttgggaggccgagttgggcggatcatctgagctcaggagtttgagaccagcctgaccaacatggagaaacccccctctctactaaaaaatacaaaaattagcctggcgaggtggtgcatgcctgtaatcccagctactcaggaggctgaggcaggagaatcgcttgaacccgggaggcggaggtggcagtgagccgagatcacaccattgcactccagcctgggcaacaagagtgaaactccatctcaaatagtaattaataataaagccatgtttcatctgtacaattcttcaaagaaatgcttcagcatcttgatcctacttgtttaacatttacattgaaggttctgctcttgtctgcagctgatctggattcagtggctttggcacccattgagtggaaagttcgcacaactttaatttttcagtcagaattgtgtaagctgaaccaattcagatgtctgtggtgtcagttactgtttctgctgttaatcatcagtcttcttcaataaggtcatgagcaagatgaatttcttcctcgcaaattgttattaatggtttgccattgtgggctgcgtggtcaacatcatctcatctcttcttaaaacgttatcaggccgggcgcggtggctcacgcctgtaatcccagcactttgggaggccgaggctggtggatcatgaggtcaggagatcgagactatcctggctaacacagtgaaaccccgtctctactaaaaatacaaaaaattagccgggcgtggtggcgggcgcctgtactcccagctactccggaggctgaggcaggagaatggcgtgaacccgggaggcggaggttgcagtgagtggagatcgtgccactgcactccagcatgggcgacagagtgagactccgtctaaaaaaaaagaaaacaggttatcagtttgtaaactctgatttctctgggtcattgtgcccataaacttttctttttcttttttttgagacggagtctcactctgtcgtctgggctggagtgcagtggcgcgatctcagctcactgcaacctccgtttcctgggttcaagcgattcttctgcttcagcctcctgtgtagctgggattacaggcatgcgccaccacgcccggctaatttttgtatttttagtagtgatggggtttcaccatattggtcagaatggtcttgaactcctgaccttgtgatccgcccaaactcggcctcccaaagtgctgggattacaggcgcgagccaccgcacccggccggttttaccatttttagagccaagctttactatatatttgatatttgttctttcttcaaccttagctgaattcacattcctctgatagaaggtgttttcaaactgatgccgttcttagtgcctcaaactagatcctgttcatacttgttagaacaagttattacaaattcactttggtgtaaaaaattgaaatccatacataatttttttttttttttttgacagagtctcactaacgctaggttggagtgcagtggcatgatctcggctcattgcaacctccgcctcctgggttcaagcaattctcctgcctcagcctcttgagtagctgggattacaggtgcccacaatcacgcccagctaatttttgtatttttagtagagatgggttttcactctgttggccaggctgctctcgaactcctgacctcaggtgatccacctgcctgggcctcacaaagtgctgtgattacaggcttaagccaccacccctggccaattttttcataatatacatttttttctcatttttcatgaaacttttgaagacccctcatattctagatattccttctcagatatgtggttttcaaatactttctcccattgagtctttttccttttcactctgtccattatgtccttttttacacaggaattttgaatttaaatggagtctaatatatctgttttataagtctttgatgcatttgagttcattttagcaacttaattcttttgcgtgtggatatccagttttttttttttaacatcaaaagaataatgtttttgcctagcattaaggcccttggtagaggcttgtcagttacaattttggagcagcagattaagtccacactcccaaccattttccttatcaggctctcaaactctgggccacaatatgtaagacccaatcaccccaggatcaggaatcagatatctagggacagcttctgtgcccaggagcttgtaaaattattccattggtcaatgcacaggggtccctgaaaacctagctaaccccaatttacatggcacacacaagctgccccctaagctccagcttgctgttatcttgggttccctcataactcttgcagccctgcctatgtccttaggtttcaagctgtaagtagcaaagtggtctacattttatgattatcattgtgacatgtcctgacatcagaaaaacacctttgtatgttattactatacaaccagcagaatattatgagtgcagcaaatgttagaaagtattcagcctaacttcactgagcaagagtaagttcatcctggagaaagtccttaggaatgcaggcaatatactttttttcctttgtcaacaggtcaaaaacagcaaagctctatcgagcttgtcttactcaccctatttttttgttgctctgttttgttttaggcttttagcctgaagccatggttttgtttctgtctctagtggtaggtggacaagaggaatgagatgagaaaggagctttactggcccagctagaaacaaactaagaacccatgactgtattctttcccttggatgaccctgtgttagcttgttgagggagatctcagcctgaaattgaatctcacatccaaacatccacgcaagggagatttgttgtaattgtcagatatatggtaaatttttgtgaatgatgttgcactttctgaccctgcctggggcctttccagagttaagttgctgaaagtgtgcattacagaagactcctgctattagctgtcatggtgccacaatgtgcatcaccttagtcaccttaaattacttagagagtgataaggtctggacttctggttaaatgtttttaaaaaatggggggtgggggggtggtgcatagattgctgtgttctctacctttatctggaatattcagtcatttgttccctttgggggcctcattcccagtcccctgactggtttgggtgtggacatcacccagctttggacagagaacacacgccaacttcagctggcagcttgtagagatttccttttttcagaggtattattagttgtctgatactgataatgttgatgataaattttctaccttccaagcttcccaacccagtcaatttccacctaagcattgctgttttcttctgatgataaaggtcatattgtttaagctacatttactcttggggttctcttcactgtgtgctgcgggttgagaacaaaattaggctttgccagaatgaaaaagtgaatggtttttggggccttcaactttttgtgctcttgaagaaataagaagacaaaatagctttcaatccacatcaggcccaatttgcattgcttcgggagttcctgggaaagtgacggacttctatccaaaatcgcgccgtgaatttgattattggtagttctacagtcagcttgagggttgttggtttgacagttgtcagagcatgttgcagctgtatgaggtgggtatctgtacatatggatgtcccatattctccagcattgcataggaatagctggtgtctagatcctgcctcaggagctatgtgtcctgaatttaaaaatcaggtatgttatatccctggggcatgtcagacatacaacaacagtgcattagtccattttccattgcttacaacaaaataccttaaactgggtaatttgtaaagaaaataaatttcttactgttgttttgttgtgctttcttttttttttttttttttttgtttactttgtttttagagacaggatctcactctgtcccctaagctggagtacagtggcatgatcatagctcactgccacctggaacccctgggctcaagtgatcctcctgcctcagcctctcaagtagctgggactacaggtgagcaccaccacacttggctactgttattattattttgacaagatttaatgtagaaagtatagcacctgttatctaccaggaatagatgaggatgatcaggtacatttatgtttgaatctgagcgtttaagtgtatgggaagatattagacactacctttcctcataagacactcagtgatctgaattgaggaacttctagtttttgctctcccacttcttggaaacccctatctactttcctatgtatttgactacttgaggtagcttatacaagtagaatcatacaaatgtattgttttgtgactagcttacttcacttacaataagtcctcaagttcttccatgttgctgtgtgtgtcaaaatttccttccttgctaaggctgaataatattccattgtatatatattttctttatccagtcattcatcaatgaatacttttttttgtgtgtgtgtgtggtagagtttcgctcttgttgcccaggctggagtgcaatggcgatctcagctcactgcaacctccacctcctgggttcaagcgattctcctgccttagcctcctgagtagctgggattacaggtgcccaccaacacgcctggctaattttttgtatttttagtagagatggggttttgccatattggccgggctggtctcgaactcctgacctcaggtgatctgcctgcctcggcctcccaaagtactgggattacaggcgtgagccactgcacccagccacatcaatcaacactttgattgtctccacattctggctactgtgaacatgggtgtggaactatcttcatgaagccctactttaatttctttttgtatatacccagaagtaaaattgctggatcacatataattctattttaaaattttttcttagttttaaattatcttttggagacagggtattgctctgtacccaggctggagtaagtggcacagtcacagttcactgcatccttgacatcctgggctcaagagatcctcctgcctcagatttccaagtagctaggactaaaagtgtgccaccaccatgcctggtgaattttttttattttttattttttgaggcaggtcttcctctggcactcaggctggagtggtgcagtggtgtaatctcagcttaccacagtccaataccaggttcaagtgatcctcctacctcagcctcctgagtagctgagaccacaggtgcacagccaccatggtggctgcatcattttacattcttatcaaaaggcacatgtttctaatttttccacatccttgacaacacttgttgtgttcttctgtttcttttaattgtagctactctgttcgaatggattttgattgaaaacatttgaggtatggcttttaggagacttgatcttaatttcctagcctttttgacctatagttttattgtggtttattgtggaaaaaggtgccctgtagctgcctatccaggtcagtctaatcacctttcatcattcaggatttatcatctgaggttcacaccaacatgtatacaagtggcatgtcttagtctgttttgtgcttctataacagaataccacaggctgggtaatttacaaagaagagacatttattggctcgtagtttggaggctgggaagtccaataccaagatactagcatctggtgagggccttctcgctgcatcataacatgacagaagccatcaaatggtagaagagcaaagagacagcaagagggaataagaacccattcttgcgatgatagcattagtccacctatgagggtggagccctcatgatctgaagcctcttaaaggttccacctcttaatattgttacagtggcaattagatttcagcatgagtttggagaagacaaaggtttaaaccataacatggtgtaagtcacataactctgggtcatatgcatatgaaagaattcgaaatttctctatgaacacatgctagtcttatttgggtttagagaaatctttagttgcagctgttaattcatcctgggtccaaggtttacatctgacagttgcctacatacttggctcttgaaagcatagatctttagaggtaattggcattttggaattttaggatattttttgggaaaataaagggggcctgggcaaaggatagaagagggaggaggtgcagaaggagaaagattaggcagggtacggtggctcacgcctgtaatcccagcactttgggaggccaaggtgggcagatcacgaggtcaggagattgagaccatcctggccaacatggtgaaaccccgtctttactaaaatacaaaaaattagctgggcgtgatggtgcgtgcctgtagtccctgctactcaggaggctgaggcaggggaaccacttgaacccgggaggcagagattgcagtgagccgaaattgtgccactgcactccagcctgatgacagagcaggactctgtctcaaaaaaaaaaaaaaaaaaagagaaagattagaagggtaaaggggaagtagaagagttagatataaggcagcaactagaggaataggagggggaggatattgcttaagtttgccaaattgttcaatggctttattcaaggaaatttttactgaaacaattttttattcagaaccttggagattgtacaaatacgattcattccaataaaaaactactgcttactgggcctgagaaattttgttttctttcttttctaatgcatctcttaaattaacagtttttgttttcttttcaactgaaatgttcctcctagtagccactgaaggcaaaaattatccgggtgaagttatgccacttagaaacctaaacactagaattgtgattgtaatcagagtacatataacatgcaggagactttcctggaaaggagacgatttcaatttagacgatccaataagtgctggcactgtctgagaggagtgtaatgattatgtaccttaggcctggttctacagcatgataggtggctacttccccacaagaacacgacaatcttcacacctcagcatgcagaaaatctgagaatactctttctgaatgaatgcctaattctctggacaaaaaagaaaaaaaaaaaagaaaaagaagataagagaatcttatcccattttatcagtgacccaaagcaaagtctgtccaaatggtcaccagtctgttgagaatcagaaaacccttggtctgtgatattagctgaaacaagtcactagagcctatgcttgagttttttttgtttttgtttttttaacggagtttcactcttgttgcccaggctgaagtgcaatggcgtgatcttggctcactgcaacctctgcctcctggattcaagcaattctcctgcctcagcatcccgagtagctgggattataggcgcatgcctggccaattttgtattttttagtaaagatggagtttttagtaaagatggggtttctccatgctggtcaggctgatctcgaactccggacctcaggtgatctgcctgcctcggcctcccaaaaggctgggattacaggcatgagccaccgcgcccagcctatgcttgagttttaccctattattatcctcttcatgacaatgctttaagaaagtacatcactaaactgttacatataagatagcaaaaagagatgaaaagaaatggtgtgatactatcaaggatggcaatgtcacgggagccaattaaaaaaaaaaaggaggcggggcgcggtggctcacacctataatcctagcactttgggcgtctgaggcaggcagatcacctgaggtcaggagttcgaaaccagcctggccaatgtctctactaaaaatacaaaattagccaggtgtggtggcacgagcctgtagtcccagctactcgggaggctgaggcaggagaattgcttgaacctgggaggtggaggttgcagtgagctgagatcctgccattgcactgcagcctgggcaacagagtgagactctgtcttaaaaaaaaaaaaaaaaaaaaaaaggtgggggggactaaacagagtctaaatagccaagaaacccagtgcaaagacagtagtgttcaaacttgttgctaacttaacatgtcatcatggatttgacaaggtgtgaagagcaaagcataaaggacctctgtggttactatacctgtttgatgactatggcccatggtgatgaacaggttagacgttatttcactgggacctctgtaagtatgatacattgtaacataatttctacaatggtcacatctaattatatcaatcctttgttcactgcaccttcattagtaagaagtatgcttaatggtagcattcatggactgcaaacagacaacttggaaataaatgaagacccaaatgagaacaaacatagcctattaaatcagaccacaccgtagtaaaggagtcatccacaatctcttgcactcagcagagcttgaaaggcaagcagaggtgtaaaaagcttcatagtagataaaaggtaaagtattaggtatgccatgactggaggctatagtcttgaggagtgtgtgtgtgtgtgtgtgtgtgtgtgtgtgtgtgtgtgtgtgaaggggttatttagaaggttgacatcctatgtgattggctagtgatgcactgactttctccagttggtcctaagttgaacatatgggcaacaattagaaagctgtcagttcttagtcatgtcttagccattttaagcgagttgttatgtgggatgttgtctggcttcctggccttgttgctagacatagtattctgacttgggagtggttactgtagataccacattagatttctgaatgggttggtgtagattatgggtcagagtcaatttttatatttggtgtagccgttgtccatttgtatagcaaatttctcacacctaaataaggaactatccacgttagtgggatttcttatttttaactggttatgttgaaaattagtttaatattcattaatttcccacaaccctttcaaaggtttgtttttgccagaccttcagttgggcagagttaatttttccttttttttttttttttaaactggttggcaaactaaattgtaacgctttggccaaaaaatagccctttccttttctgaatataaagagaatgggttttaatttttggtcttttctttgttcttccttcactaatcctgcagaagagaccataaggcattatccaaatcttcatttgttgggggcatggttttcaggtagtattgccaccacctgatggcaatactattgctactcaatttttctctcactgctactcaattgcagtgagagaaaaatagctctaaatgccgactttttgtagtgcattgtaaaaagctgaataaagccagggacggtgtcctgtacctacagtcccagctgctctagaggctgaggtgggaagatagctttagctcaggagctgaggccttatcataaggccttataagactacctggaggcttcatctgcatgatataaccttggtcttcacaaccccttgtctttttttgtttttgagacggagtttcgctcttgttgcacgggctggagtacaatggcgagatctcggctcaccgtaacctccgcctcccgggttcaagcgattctcctgcctcagcctcccgagtagctggcattacaggcatgtgccaccatgcccgtctaattttgtatttttagtagagatggggtttctacatgttggtcaggctggtctcgaactcccaacctcaggtgatccgcccacctcggcctcccaaagtgctgggattacaggcgtgagataccacgcccggcccacaaccccttaacccagacaaccatttctactgattccaggtctttagatacaaactctttcaaccaattgccaatcggaaaatctttgaacccacctgacctggaagccccgcccctcccttccagttgcgcctttccagaggaatccaatgtacattttacatgtattgattgatgtcttacgtcttcctaaattgttaaaaccaagctgtagatgggccaccctgggcatatgttcttaggatatcttggagccgtgtcatgggccattagtcactcatatttgtctcagaataaatctcttcaactatttcacaaagttccacccttttcgtcgacagaaagatattcctccttcaactctccatcacatcctgtgtgggtcttttctttcttgtcccaacagaagcacactaacgatcaaaaaaaagtctccagagcctcagtatgtgtgtacttgacaagcacaaaagagctgaccgctatgaatggaggaccagttcattatggtcagccatgtcgcttctgatgttcttcctttcgggacttgctgtgcttcagagaatctgaaacgacaggtctctgaaatatttctcagacttgtcctagactgctctccgggaaaatctggttacttgcagtttaggagtcagcaaagcccctccacgtccttaagagccccggaactgcatttcttaacgctcctccaggagcctccagcttttttccgtaaggtccgcgcgcccagcattgtgaggcgaggcaggcagcagcgtgggaactacattacccagaagacactgcgggcgacacaggcagcaacgtgagaactacattacccagaagacactgcgggggcagggcagcgagtgtagccattggtctagcagagagacgactaatgaggtctcaattgtgtgggcgggacttctggcggcgccctcatggttgcgttagcatggctacctagggatctgttcactgatttagagggtcccagagctctgggtcgggactgaggtgaaagagcggaaaaacgcgagaagcggtgttccttctacacagaggctagagtgcggatcggctgagtcggctgcaggcgcccctgcctccgtcagcgtccaggtgaccgccgttcccgccccgctcttccctgggtggactggaggaggccgcgccgatgaacctgaccgaggtgcgtgcagcgtcccaggccgccccgcccaacccctcctcccagtgctgaagtcccaaggagccgccctgcaggttaggcccttgtgtctctaagagaggggcgttcttgtgtggggtgcccgggactgggactgcggtgcgatgaggcgggggagctcccgtcggagaccgacacgtctctggggcttggaggcactgcagaacgggcggcactggggagcccgagcgtctttgtctccaaggagcagaggttgaggcggagtctcccctggaagggcagtggagccgcagagagccatagagggctgtgcagggaggacgaatgggagggtcacgcccagagttagaagtttaaagttggggaaaacaggatgttgaacgggggcagggggaccgctgaggagaccccttgagttatggtagggctgggccagaggggttgcagtagaggggagatgtgatgagactctggatggatctcagagatagggtcaacaggatttcctgctgcatcaaacatagctgtgagggaaagtcggtagtgaatggtgtcttccataggttttgttttggcctgaaaaatctgaaagaatggaattagagatatcagcttaaggagcgggtttcagacagaagatcctgggttggattttgggcgacatcacatgggtaggtggacgtaatttccaaaggtgagggaaggtagctggcctggagctttaaatgagttagaagttgtgcacttgagaagttggcctgtggatcagattgagaaggaagaatcctacatcgttttttcatatgggctgaggtaggggagggctcagatttggaggaaagaccatggtagggagggcatctctgatactccctgcagaagggagcagatatgggctaagagtctggtctgtttctgttgaaaaagaggcctggatggataaggagttgccctggaatacagagactgaggcatgagataattgtagtcactccacccttctaactcagctggccctgagggccactctttagggaacaagataaggccatgcagcaactgggtccaaaactgggcagggctttctcacatcctccaccacagttaagggcctccagcaagctccctttactgcattatatggcaggctgacctgtttgctgaacggaccagtaactgattgactgctcagccccatcctacaactcattaacttagggatgtaaaaacaggtaattgacttaaacagtaaggaactatatcaatcttaaataaccaagcaagtcagaatctagtttaaagagagtttattcaagttcacatgttgatgatagccatctgggaccatagattcaagttgtcctgaatatacacttcaattaccacagtgacaagtgtttgctttttttttaaggaaaaaagaagcagtttctgagttgtttaccaataacttatgttaaaataagataagtttttattggctatacattcttatttatattatagattacagaaacatgaagataataggtgagacagctagtcaggaacagaatgtcttaaaacagttgtcctcaggcataggttcagggatgtgactgacatctcatatattcttgcctctctgagcctgatacattttgtgtaggtcagacaggtctgggctatttttttttttcctcagccaatatccttctaaatatgtacacataggcaattggaaatagatgtaatcaataatttaaatgtattaaaatatttattgttagaatgttaatttacctgtaactctgcttatagtacaaagctttatatatatatcacatttccttaaaacattaagaagtgtgggctgggcacagtggctcatgcctgtaatcccagcactttgggaagcgaaggtgggcggatcacgaggtcaggagtttgagaccagcctggccaacatggtgaaactctgtctctactaaaaatacaaaaattacctgggcgtggtggcgggcgcctgtaatcccagctacttaggaggctgaggcaggagaatcgtttgaacccgggaggtggaggttccagtgagctgagattgtgccattgcactgcagcctgggcaacagggcgagacactgtctcaaaaaaaaaaaaaaaaaagggaaaaatactcaaattttcaaaacccttctactttgtgctgaaaacatgtacaaaaccattaatcctatagaaagtaatgcttatacatagtgtgtactacttatgcttcttgtcaatatgagccctgtgaagtgggaacccttttaatctccattttacacataagggcactgaggcttagggaggttcagtccttgtccaaagacacagagctgctaagaggcagcactgaacttaggacttgctgtagcttcagattactttgctccagtacagggcagagatggttgtacagctcagcctgtaggatgccacagtactgtcctgatactcatggcttgcttcttcctgttacaggccgaaagaatgagggtcgtgatcaactcagtatgccactggaggctatatgagtaaacagcaaactgtttctcatgaaagcaggatgttggcaaactgacaaactgcgtctgccacccagaaggaatgctgaaggcagtcacgacccaggcacaagtgtttcttgtgattaggcataattgaagcctgttaacaataatgtgaacttgtgatcaattaagcagctgaccagtcgttacctcctcctccctttcatcctacccaataaatgtggagggctgtggaagctcaggggctgcctttgctcactagaagcagggagctctcttcttccccagttcgccttctttaaaacagtttctttcgtcttaagttttcatttctacgttcgtcccccttcattcagtctcgtaatgatggtctcaagtagtaacagtaactgtcgtagtgatggtctcaagtagtaactgtacaagtctgccacatcttcccacagggtccattgcagtggcagcaatgcataaggaccctgcacaggtaagtcaaggatttctcaggctctctaccccaggcccccaccacttatctctccgttattttaggcatcctgatatagggaaaggtggtgtcctgaaacttcatgtttttcccttccttgggtctgaagactgtggttccacgacaaccaggagtcagaactcagcctctggttatagagtggtcctagttccgacaactgatgggataagatgtggcagggcgttcaggcacgggatatagaaagttcaaatgcttactggtgcgacttagctgggatgtttagtgaactgaaaatccatgttgtatctggtcgtgatagagtatggcagcagggtaggaggttggggcatacagggcatgcgggatcggcatggaatggcagtctaaggttctgggcctttcatctgagggcgatggtaactagggaaggtttgaggaggggggaaaaagaggtgacctgacccaggttttagtggctccctctgcctgcagaatggaagaccacgtgcaggtgagggtggagccaccgatacctgggtgatgggtccagcaacagcccaggtggaggttgttggtgactgaacgagagtggcggtggtggaagtgggaggagtggggggcttctgtatgtgtttgatctagagctgcctgtattttataacgtagagagcaaggaagcttgggagctgagatggaagagggggtcaggaatggccccacagttttggccttatttggaaggatggatgtcccagcaactaagatgtagtaagttctgtagtagggggagtgtttatatagtagagcatatgaggaaccaagttttggccaagtcaaaaatgttccagtggccaggcatggtggatcacacctgtaatcccagcactttgggaggcagaggtgggaagattgcttgaggccagcctgggcaacatagggagactctgtccctacaaataataataaatagctgggtgtggtggcgtctctctgtggtctcagctaatcggcgtgctgaggcaggagggtcacctgagcctgggaagtaaaggctgcagtgagccatgattgtgcccctgcactccagcctgggcaacagagtaagacaaacaaaaacaaaaatccaagccaaaacaaaaacaaaaatacacaaaaaatgtttcagagactttgagtggaggtgccaggctggcagttgtacacacaggaatggagttcattggaggtgttcaggaaggagacatccactacatgatagctgaactgttgtgaaactgggtcagatttaggaagcaatggtgttagtaggaaggaaggagaaggaacagactgaggactgggtgtctccactgggcacctggatggtgttggtgggtgtcacaaagacagatgagagagtggatcgactgagggtatgtgtgtgtatgtttgtgtgttatgttgggggcagcctgtggagtataaggaagggcttttgaggggagagtggccatgagatggatggtgaggcatctccacaaactcaccagggtttcatggtgagtcttgcttggacctgggtagtttcatgcaaactgtgagactactttaggggaagatgggatcagcaaggagcattgctaggcctggggtggggatagcattggggaggtcagtgtatctgggctttggattaggattagggggatagagaatgttgtgactgcttatgggaaaacatgtacattgcaaaagggggagacagccaagatctggaactcagaggaggtatgcaagaactgtgaggttgtcacttgggttttgggggggctgaggttaaaccagaaaacaggactgggaagggagaccttcagaacagggctcggtgctgccccaggcgctagggaacattatattctgggcagcccaggagcaaatagggttctggtgcactgcaggactccatgtacagagtggcatcttgggaggccatggaaatgctcctggttgggccagggctgctgttagtattgcaagagtggaggcattagatacatgagagaggtactgtccaaagcgagatgcgaaggtgaggaggagcatgaatgcgtggtcccagccctggcaatgggcacgtaagggagaagagtgagcctgagtttgggtgtctgggaggcaagatctggagaccccaaggaaatggggtgacaaaagaaggtagggccggccgggcgcagtggctcatgtctgtaatcccagcactttgggagaccaaggcaggtggatcacgaggtcaggagttcgagacccgcctgcccaacatggggaaaccccgtctctactaaaaatacaaaaattagccgggagtggtggcaggtgcctgtaatcccagctactcaggaggctgaggcaggagaattgcttgaacctgggaggcagaagttgcagtgagccactgcactccagcctgggtgacagagcaagactcttgtctcaaaaaaaaaaaaaaaaaaaaaaagagggtagggcgccctgggctaggcattgatgatgcttttgctttctccccacccatctttgtgctgtgctggactcagcaatcagtagcagtgggggcgagagaagtgcgaatgctaccaggatgtggagtctcttcctccttgggaagtgggtggaggctaagcaggggatggatgtgtgtgggtactggggaagcactgaagattctggagagggaagtgtatcagtgattgacccgctggattttcatttttggaaaagagtgagtgatgacagagaggctaatggcattgaaataattttaattactttcatttccttagtgcagggggaatgccgtgctgcaccaggccacgggaaatactagatttggttaggaggcagaggcatgactgaagggaaagcatatatcagagactgtattggggttttggcaggaaaggcatgcagggtgggatgaggagcttaaaactcagtggtttgcataagtctggcagccttagggctaagagattatcccttattgtgtggtgacagggcttgtgttgattaggacaggagaaataatcatgtatgagcattagatagtggttcagcatatgggatctggatcgcaagggaaatgtaaaaacattggctgttagtttggccctccaattcttagattttaagtagataaatacagatctaaggaaacacagaataagaagttgttcatagactgaagtgtcataattttggcaggattgtatggtctttgaggatgtggccatatatttctcccaagaggaatgggggatccttaatgatgctcagagacacctgcacagcaatgtgatgttggagaactttgcgcttttgtcatcagtaggtaaggccttcatacctactctggtgtcttgtgctgggtgctgtttttttgctcttttccatgacaactctgtctttcccacaccagattgtgagtgctacgtcctgtcctctcctggtttcctggcaaatgtgataaggcagccagagctgggctgtgtatactgtaccacctccccttaagcagccccagcttctgttgctctgaaactttacaagataaggctcggaagtcagaaatcttcaggtttctttaagatatcctaatggcggtgcctgtccctggtttgattactctgtccaaatgtgtgaaacctctgtccaagggtttccctgttccccttgctgacatacttggagacagtgtctgtgctaggaatttcaggcacctccctggtcaccacttgtgaggattgtgaagttatttctgcaggacgctctactgggtgttctggtagctttagaatgcagcatgtcctgggtttattgctctgtgtacatgctgtcccctccctttccctgcctttcccgtagctggacttatgccgcagctagatagttgctcaccttgagcaagggggaggtctctgggtgcctggcagagtggatagtcctctattaatggcaagagacactcagaaggacttggccctggtgggtgaaagctgggaaaggatgtgatatcaaggctgggttcaaatcacattgagaacttaccttgtgaccactattgtttgatgcagggccactggccactcgtcactcttcctttccttccctgttgttatttttactctgacttctgacccctggcttccacctctgacccctcctctccagccttcatctctccaccattctcttccacctctccctttgcagtgctgtctaatgtatgacctgtactttaggtgttatgaggtctgcgtgtatccttcagtagtccatgaatactcgctctcacacaatcagatctctctggatctggacacaaccgtcatggcctgttgaaagccatttatagaggagtgagttggagaccccacctgccctccctgcatggtacttctcccttgtgtccttaccaccaggattcccccactacacacacttcacaggcccacctctgaacactgggccttcctctcactggccttatttccttgcctgtgaccagtcctgtgccctcatttgtgggtgtgtctcacagacatttgtgatggggctgtctcctccctccggagttcacgtgcacttcaccagcatttctgttcttacaggttgttggcatggagccaaggatgaggaggtaccttccaagcagtgtgtttctgtaagagtgttacaggtcacaattccaaagccagctttgtccaccctgaaggcccagccctgcaagatgtgtagctcaattctgaaggacattctgcacctggctgagcacgatggaacacaccctgagcaagggctgtacacatgtgcagcagagcatgacctgcaccaaaaggagcagattagagagaagctcaccagaagtgatgagtggaggccttcatttgtgaaccacagtgctcacgtgggagagaggaacttcacatgcacgcagggtggcaaggattttactgccagctcagaccttctccagcaacaggtcttaaacagtgggtggaagctgtacagggatacccaggatggggaagcctttcaaggtgaacagaatgatttcaactccagccaaggtgggaaagacttttgccaccaacatgggctgtttgagcaccaaaaaacccataatggggagaggccttatgagttcagtgaatgtggggaattgtttaggtacaactccaaccttattaaatatcagcaaaatcatgctggagaaaggccttatgagggcactgaatatggaaagacctttattagaaagtccaacctagttcagcaccagaaaattcacagtgaaggctttctttcaaaaaggtctgaccccattgaacatcaggagattctcagtagaccaacaccttatgaatgcacccagtgtgggaaggcctttcttacacaggctcatctggttggtcaccagaaaacccatactggagaacagccctatgaatgcaacaagtgtgggaagttttttatgtataactccaaactcatcagacatcagaaagttcacactggggagaggcgttacgagtgcagtgaatgtgggaaattgtttatggacagcttcacactcggtagacatcagagagttcatactggagaaaggccttttgaatgcagcatatgtggaaaattctttagtcaccgctccacactcaatatgcaccagagagttcatgctggcaaaaggctttataagtgtagcgaatgtgggaaagcctttagcctcaaacataatgttgttcagcatctgaaaattcatactggagaacggccttatgagtgcactgaatgtgagaaggcctttgttagaaagtcccacctagttcagcaccagaaaatccacactgatgcattttcaaaaaggtctgacctcattcaacacaagaggattgacattaggccaaggccttatacatgcagtgaatgtgggaaggccttccttacacaggctcatctggttggtcaccagaaaatccatactggagaacggccttatgaatgcactcaatgtgcgaaggcctttgttagaaagtcccacctagttcagcatgagaaaatccacactgatgcattttcaaaaaggtctgacctcattcaacacaagaggattgacctcaggccaaggccttatgtgtgtagtgaatgtgggaaggccttccttacacaggctcatctagatggtcaccagaaaatccagactggagaacggcgttatgaatgcaatgaatgtgggaaattctttttggacagctacaaacttgttattcatcagagaattcacactggagaaaagccttataaatgcagcaaatgtgggaaattctttagatatcgctgtacactgagtagacatcagaaagttcacactggagaaagaccttatgagtgtagtgaatgtgggaaattttttagagatagctacaaactcattattcatcagagagttcatactggagaaaagccttatgaatgcagcaactgtgggaagtttcttagataccgctctacattcattaaacatcataaagtttgcactggggagaagcctcatgagtgcagtaaatgtagggaattgtttaggactaaatcgagccttattatacatcagcagtctcacactggagaaagtccttttaagttaagggaatgtgggaaagacttcaacaaatgtaatactggtcagcgccaaaaaactcacactggagaaaggtcttatgagtgtggtgaatccagcaaagtgtttaaatacaactccagcctcattaaacatcagataattcatactggaaaaaggccttagtggagtgaatgcaggaaagtcaccaaaactgtcacctcattcagcaccaaaaggttcacatcggaccaagaacctattaatatatgtaaatctaatgttgaaagagttcagatggaaatctgcgaggatttcctgctgggaactacattaaaaacatttatgtccaggcgtggtggctcacgcctgtaatcccagcactttgggaggcagaggtgggtggatcacctgaggtcaggagtttgagaccagccgggccaacatggtgaagccccatctctactaaaaatacaaaaattagctgggcatggtggcaggtgcctgtaatcccagctattcaggggactgaggcagggagcatcacttgaacctgggaggcggaggttgcagtgaactgagattgttccattgcactccagcctgggtgacagggcgagactctgtctcaaaaagaaaaaaattataattgtggcaaattacaggtaacttaaaatctaccatcttaacccatatttaactgtactgttcagtagtgttaagtcattcgcattgttgtcaattaatatccagaagttttttcaacttaatgaaactaaaacattataccctttaaaccaggggtccacaacccccaggctgcaaactggtaccagtctgtggcctgttaggaaccgggccagcatcactacctgagcttcacctcctgtcagatgagcagcattagattctcatagcagcctgagccctattgtgaactgtgcctgtgagggatctaggttgtgtgctccttatgagaatctaactaatacctgatgatctgaggtgggacagttttattctgaaactgtctgccccctcctctgtccctgatgcgtggaaaaattggcttccatgaaaccagtccctggtgccaaagaggttggggaccgctgctttaaactactcctcttcctcattccctacgccaaccagcccctgacaatactactgtatgaattttactataaatatctcatatgaggaaacttaagttttagtcttttgtgacttattttgaggcttatttccctaaatgtcttcaaggtttatccatgttgtagcatagcttatgattttcatcttttttaaaggccgaataaaatcccattgtagtcatgtgtcgcctaacaagaggactgtgttctgagtaatcatcttaaggtgattttgtcattgtgtgaacaaagagtgtacttacacaaacctgaagggcacagcctattacgcacctaggctatatgatatggtccattgcgcctcagatataaaccttaacagcatgttacagtattgaatattgtaggtaattgaaacacaatgataagtaaatgtgtatctaaacatatctaagtttccaaaaggtactgtaaaaatgtatgaaaaatggtaaaaactttatagggcactaacatgaacgaagcttgcgggacccctctggttgagtcagggagtgagttgtgagtgaatgtgaagctctaggacattactgtaccctattgtagatgttataaacattgtacacttaggctactctaaattaattttttctttagtaataaattaaccttagtctactgtaacgtttttacttcatgaacttttaaaattttaaaaagctttttgactcttttgtaataatagcttaaaacacaaacacattatacagcctgtatagaagtactcctttatattctataaactttttctatttaattttttaacttcgtaaaaaataagttaaaaatgaagacacagacacacacattagtcaaggcctacagagggtgaggatcattaatatcactgtcttttgcctccacatcttgtcccactagaaggttttcaggctcaataacagggagttgttatctcctatgataacaatattctggaatattttctgaagccttgcctcacactttttttttttttttttttttgagacagagtctcgcactgttgccaggctggagtgcagtggcacaatctcggctcactgcaacctctgcctcctgggttcaagtgattctcctgcttcagcctcccgagtagctaggattacaggtgcctgccaccacgctcagctaattttttgtatttttagtagagatggcgtttcactatgttggccaggctggtctcgaactcctgacctcatgattcgcccgcctcagcctcccagagtgctgggatgacaggcatgagccaccgcgcctggctttattttttttttgagacagagtcttgcactgttgcctgggctggtgtgtagtggtgtgatcttggctcactgcaacctccgcctcccgggtacaagcgattctcctgcctcagcctcccgagtagctaggattacaggtgcccaccagcatgcccggctaattttttgtatttttagtagagatggggtttcactatgttggccaggctggtctccaactcctgacctcatgatccgcccatctcggcctcccaaagtgctgggattacaggcatgagccacagcgcccggcctgtgctctttatatgactggcagaccagtaggtttgtttacaccagtgtcaccacacacacttgagtaatgggattgagttacagtggctgtggtggcactaggtgataggagttgtttagctctgttataatacgggattactgttatacatgtggtccatggtagacagaaatgtgtggcatatgactgtggtatatgtatatgccacttttcctgtattctttcttcagtgtacatttgggttgcttccactcttctgttcttgttaatgccactatgagcatgaatatacaaatacctcctgaggccctgctttaaattcttcttggacatatacccagaagtggaaatggtgcttcccgttaataataataattataataataataattattattattattttgagacggagtcttgctctgtcacccaggctggagttcagtggcacaatctcggctcactgcaagctccgcctcccgggttcacgccattctcctgcctcagcctcccaagtagctgggactacaggtgcccgccaccacgcccggctaattttttgtatttttagtagagacggggtttcaccgtgttagccaggatggtcttgatcttcctgactttgtgatccatccgcctcagcctcccaaagtgctgggattacaggcgtgagccaccacgcctggccacttcccgttaattctattttaaattgtggggggaattattttccatagcagctgcaccattttacattctcaccagtgcaggggttctagtttttcacattattgccaacactttgttttttaatcatgatgggtgtaagatgttattttattatggttttttaatttgcatttcagtattggtgttgagcatcttttcatttgcttgttgactaattgtataggttctttggagaaatatctgttaaatgtctttgcccattgaagaaagtttttgtaaattttcagataacattgtatgcttttgttgtgtacaacatgatgtgaagtatatatactttgttgagtggttaacatgtacgtattatatatgtacatattctgtatacgtattttaaatattaaccccttgcagatatgtgtttttcaaatactgtctaccattcagtctgcttccttttcattctgttcatgtcttttttttttttttttgcacaggagttttcaaatttcaatggagtccaatatatgttatgtttgtttcctatgcttttggtattatacccaagaaattattgctaaatccagtgtcatgaaccttttttcatgttattttctaggagttttatagttttaagttgtacttttatgtctgatttatttcagtttgttttagtaaatggaggaaggtaagagttcaacttcattcttttgcatatagatatccagctttttgaaagtcatttgttgaaaagactccttaataagtttttgcgctcttgtcaaaaatctgagcataagtatgaggacttccgtctggcctctttattccactatatgtatgcatttgtgctagtaccaaggtgttttgatacataattcttttaaaagaataatgtttctgtccactgttgaggcccttgctagaggcttgacagtgctacatttggaacagctgattaagtacacttccaaccactttccttaacaggctgtcaaactctgggtcaatatatatcagccccagtcaccccaggagcaggtatcagacatctggggacaactcctatgccctgaaatgtgtaaaattactcaaattggccaagtatagaaagcccagaaaatctagctaacccgaatccacttgccacacacaagctgcctcctacaactccagtttgctgtattactatctatattccttcacaactccggtgcagccctgaatcatgtcctctggttctgagttgtaagttacaacatgctccacctttcatctatctgtcatgtcatgtcctgacatcaagaaaacttctaaatcttaaaactacatacccagaagggtatcatgagtgcagcgaatgttggaaagtcttcagccattaacctcattcagcaccagtaaaccatcttggagaaagaccttaggaatgcaggcaggcaaagtgcttttgccagcagataaaatagtaaagctgtggatattagcttttgtgagggagacctcaaccagaaatggaatcttacatccaaacatccacacaagggaggtttgttgtaattgtctgctatatgagaagcttttgtgaattaccttgcactttctgacctgcctgggatccttgccagtgttaagtcactgaaagtgtgtactacaaaagacttccatccactattagctgatatcacagtgtgtatcaccttaaaatgcttagggagggcagatagctgtgctctctacctttatctggagttattgagtctgatcccttcgggcgaggcctcattcccacttccatggctggtttgggtgcagacatcatccaactttggacagaggatacaggctggcttgagctggcagcttgtaaagattttcctttcttcatgggtattattgcttgtcttataatgttggtgatagatttttcaccttccaagctgcccaaacccagtcaatttccacgtgactatactggttttagtgatgataaagtcattgtttaagctacatttactcattgcagttttattctctgtgtgctgtgggttgagagcaaaattggagtctgccaaaatgaaaaagtgagtggttttgtgaggttttcaattttatgtacttccaaggaaatagcaaaaacaaaaaaaccaaaaaaaaaaaaaaaaaaacaactcaatccacaaacgcctgatgtatattgcttcagaaggttcctgggaaaaagaaggatttctatccaaaatcctttaccctgaatttgaagattatttatggttgcacagtcagcttgcagccaggacaattggtttgacaactgtcaggatttatggcagctgtgagagctgggtatttgtacccatgcatgtcccatattctccagtattgtttagggatagcttgctcctgtgatgtgccttatgagctatgtgtcttgaacccaaaaatgatgtaggttatgttcctggatgtaaaatgtaagagtgcattagtttgttgtccattgcttataaaataatacctgaaactgggttatttataaagaaaaatctatttcttacagttatggaggttgaaaggtccaaggttgagtggccgcatttggtaagagccttcttgctggtagactgtgcaaaaagtcccaaggtggtacagggcatcacatggtgaggctgctgagtgtgctcacatgttaacgtgctagcgcaaatcattctctctcttttttttttttttttttgagacggagtttcgctcttatcgcccaggctggagtgcaatggcgcgatcttggctcactgcacctccgcttcctgggttggctcaccgcaacctctgcctcccgggttcaagcaattcttctgtctcagcctcttgagtagctgggattacaggcatgtgccaccacaccccgctaagtttttatttttagtagagcagggtttctcccatgttgatcaggctggtctcgaactcctgacctcaggtgatctgcccgccttggccccccaaagtgctgggattacaggcaagagccacggcccctggccctttctcttcttataaaaccaccagttctcccaggataacccattagtctatcaacccataaattgattaattcattcctgaggatagagccctcatgattcaatcacctcttaaaggtcgcacctctcagtactaccacactgtagattaagcttcaatgtgacttttggaggagatggtcaaaccatagcaagcagtttgggaaccatagtctgtacagaaacagtgattgtattaatatgaagtatgagacaccagcaaactagagtggaatggatgagcgccttgtaaagagacatccatgaatgtttcagtaactatggctatgtgagatgagggtatacagaaactctgaggacctacagacgtgtgtatctcctgtaggcaaagtcattgtcagagcaagtaatccaaaggtgttatggattcttgtgtctctggcgttataaaacgtatgttgaattttaattgccattttaacagtgtggagaaatgggacctttaagaggtgattaggtcatgatggctctgcccttataaaggaatcaatgcctttatcataagagtgggtttgttaacccgagagtgacgtttttataaaatcagctgtctctgtctttcatgctcacttgcccttctgtcatattatgacagagtaacaaggccctcaccagatgccaagcagataccagtgccatacccttggacttcccagcctccagaactgtatgaaacaaactactttataaattacgcaatctgtggtgttttgctatagtagtggaagacagacacagacataaagcctgttaattcaaaccactactgcacaggtaggagcctcatgactgaatgaagggagattctatacttctgagataagtcttttttttttttaaacctaaacataattcctggtgactcaggtggacataaccttccttgtctccagttcttcttccccgagattctgaatttccaacaacattgcttccagtttttgatactataaaatcagagttgacccacgtaagacatgaggagaggctaatgatggaatcaacacagctttgccagaggttataaaagaggattgagaaatccagattttatttggaatttttcttttctaacagctttattgaggtattagtgacattcagttgcacattgttaaagtgtaaaatatataaaaacaatcaccaaagtcatgataataaacatatccattgcctcaatagtttgtttgtacccttttctattctctctcgctcacagtcctacccaaatttttatgctcaggtagccactggtttactttatgtcactatatacatctttccttccttccttcctccctccctcctgctcttttctttttccttttttcttttcttttttctttgtttctttccctccctccttctcttctcctctcctctcctcctctcctcctcctctcctctcctctcttctcttctttctctttctcagaatttcactcttgttgcccaggctggagtgcaatggcacgatctcagctcaccgcaacctccaccttctgggttcaagcgattctcctgcctcagcctcctgagtagctaggattacaggcatgcgccaccacgcctggctaattttgtatttttagtagagacgggggtttctccatgttggccaggctggtctcgaacgcctgacctcaagtgatccacctgccttggcctcccaaagtgttgggattacaggcgtgagccaccatgcccggcctataaattttctagtatcttatacaaatgaaatcctacattacattcatatggagcattttttgatatttatacatgttaagcgtattcattttttgttgatgaagagtattgcattgaatataccacaatttattaatctattaataaatattttgattgtttctagtgttggactaaaaaactaacaaagacccatgaacattcatatacaagtgtttatatgaatatatttagcagaattgcatttgttatacctccttgtccatgatggttatggtgtattttaaagattaaccattttcatagatgtgttgtggtcagtgtggtttttaaatttgcatttctctaataattaatgatgctgaataagtttttatatgcttatttgttatctgtatatttggccaaatttctaaatcttttccctttttttaaaaaaaaatcttatttttctattttaatagagttttaattttagaacattttaagatgtacagagaaattgcaaatatagtacagagatatctcatttacaagcacacctagttgttactaatatatagtcatatattagtatacagcattatttacaattagtgaaacagttttgatacattattaaactaaagtacatctttgattgagatttcctcagtttttaccaaaatacatgttctgttccagaattccacctaggataccacattgcatttattttattattttttattcttttatttattttttttcatgtgtctctaaatgtaaccacattacagttagtactcacatttctttaggcttgtcttgcttatgagaatactcatttattttgatattgatttttaatttttttttttttagatagtcttgctctattgtccaggctggagtgcagaagcactttctttctttcttttttttttttttttttgagacggcgtcttgccctgtctcccaggctggagtgcagtggtgggatctcgactcactgcaacctctgcctactgggttcaaggattctcctgcctcagtctcctgagtagctgggattacaggcacctgccaccatgtctggctaatttttgtatttttaatagagatggggtttcaccatgttggccaggctggtcttgaactcctgacttcaagtgatctgcccacctcagcctctcaaagtgctggggttaccggcgtgacccacggtgcccagccacttttagttatttttatttttattttgagtctccctccgtcacccaagctggtaagtaattctcgtgcttcaccctctggagtagctgggactacaggtgtgtgccacatggttggctaatttttgtatttgagacagggtttttgccatgttggccaggctggtctcgaactcctggcctcaagtcatcttgagtggatcacttgaggcatttgggagtgcctcagcctcccaaaacggtgggattacaggcgtgagccactgtgcccggcctgcacatgtctttcttacatgtggactctccaggggatttatgctgttcaagaagcacctgaatcaaactgtgctttaaaaatatttttaaaacattccatgattcttcatagtacaaaaatgagaaatctcccctaaatctctaaagaattccctttttaaactttttgatttcctgaacttgtctgaaggacttaacacagttatatagagtgttctttgtgtaacagtatccatgactttcatttttagctctggtattagatcttcctggacaagagcattactggccatgtgtatgttgctatcacaaataactagtagttaatatttcctaaatcttagcaagagttatgataaatagctgaattccatgaagagaaaagactcatggcatgacaaccagattaggaaagagtgttttccttgtcctgcaggcaaaacagaactgagagatatgagtatcactcatgatgaggacaaaagggctgcgtgctgggaaacatgaggcgaccaacacagagttggtcactatccactggcctgggtttgcaactacagttgtccaaattgtcagaaaactatggactgaatagaaaacaaaaaaggagctcaccaggaccatgatggtgtgtgtggctctggcttcctgggaaggtctgcaggagagtctgttgctgtgattgtgttggacttgctgcttgtgtctgtagaggaagaagaccatggagccactggcccagaccatgaagcccaaactcataaaatcaggggaaaaatataagactgcatgtaatgagctaaatctctttgatgctttgtaagaacagtatccataattgttttttgcactactgtttttgctattcagtgggccattcactaatagaagaacagatgcattcatcaagacatggggggcccagcagaggagacaacagaagtcaataaaccttggggatctaatcttgatctccatccacctgcatatactggggttgagcttaatggcttggaatccattgagaaggcagatggtgctgagggaaactcttgtgcccaccctgtgataataaaagacaaacttacatccagtgtcattcagcaaatatttcaatccaaaagctgccattgtctgaggtatccctttaaagaaaaggaccatggagttagccaaggccagttggctgagaatcaagtccgtgggtctcagcttgtgtccagtgaacaaaattaagttataaaaacaaaggagaaaggaatttcccaggatcccaactccagtctgaatgaggaagctaatccctgattttacttttccaaaagccatttcatcaaaatctaggggatgttgattttcattgaggtctgaagaatcagtagaataaaaaagcagaaagaagtatcttgtcatcagtggagacagaagttttaatgtgtctccaaccatattttctcatcttaaacagaaattaagattgtccctgttcgtgcaaaggcaattgcttgtgtgtccaactgcagagaagcaggtgaatgaatgagggctcaaccgcacaacagatccacaaatcaaacctataaaactcagggcttacacacatgcaacaagtaaatacaagcaaaactagggaaatatataaaaacagaacacagaagagtcaatatcattagagtgatattatactatagtttgcaaaatgtaatcatgacggaaccctgggtaatatggacagggctttttctgtattatttcttatgactgcttgtgagtctacacttatttcaataaaaccttcaattaagtagcctggagatatgaaaagcaaaaataatacaccataaaaccttttccacactaatattttagtaaacaccattgttattgatgcattgaaacaaattttaggccgggtgcagtggctcacacctgtaattccagcacttcgggaggccaagatggagaccatcctggccaacatggtgaaaccctgtctctactaataatacaaaatactaataatacaaaaattagccgggcatggcggcgcgtgctagtcccagctactcgggaggctgaggcaggagaatcgcttgaacctgggaggcagaggttgcagtgagctgaaatcaaaccattgccctccagcctgggcgacagagcgagactctgtctcaaaaaaaaaaaaaaaagaaattaaaaaaacgctacaatacaattggtaacaaggccttcagcacagtacaaatgctaacttgaagaatttttaaaaactataatttttggaacaatcaacattgcatcatggtatattttattttaagcacatatatttctgttattttccaccggacaggtctagagattgtgaattgactccgtagaaataaccatgaccaccttgagcccacacatttttatctcaatgccatttctcacaagtaaatgcaaaagatcctgaaaataaatactaatcccagaaacacctaagatatccttaaaacttgttaaataggaaattcaatatgttccagaaagcttgggtttatttttagggaaagataattcaattgggagggaatttcattgcacaatattcatatatatcaatcacaaaagaaatagtaactgcggccaggcacggtggctcacgcttgtaatctcagcactttgggaggctgaggcgggtggattacaaggtcaggagatggagaccatcctggccaacatggtgaaaccccgtctctactaaaaatacaaaaattagctgggtgttgtggtgcgtgcctgtagtcccagctactcgggaggctgaagcctcctgggttcacgccattctcctgcctcagcctcctgagtagctgggactacaggcgcccaccaccacgcccggctagtgtgtgtgtgtgtgtgtgtgtgtgtgtgtgtgtgtttagtagagacggggttgcaccgtgttagccaggatggtctcgatctcctgacctcgtgatccgcccgcctcggcctcccaaagtgctgggattacagggatgagccacctcgcccggccataatttagattcttttggtgtctctatggaattgctatcatcagggaaaattatgaggtattttctcccatgaataactacatctctttaggggtggagcaatcaataacacagcagtatcaagattctcaggcgagaggtggctcacgcctgtaatcccagcagtttgggaggccgaggctggtggatcagctgaggtcgggagttcgagaccagcctgaccaacagggagaaaccccgtctctactaaaaatacaaaaattagtcagaggtggtggcgcatgcctgtaatcccagctactcgggaggctgaggcaggagaatcgtttgaaccccagaggcggaggttgcagtgagccgagatcatgccattgcactccagcctgagcaacaagagtgaaactcggtctcaaaaaaaaaaaaaaaaaactcaggctctgaggtatgaaaaccttttagattcccacaaaccacttgttgacaaatgtttttcctatttatatgaactcatcatttattttcaagatagttcctgattctttgctttaatctcttattttgctccattgtcctagttgtataatttatttccaatatgcatttggtttcctattttttcagcttctccttataaagtaccatttttactatgactattttgaaagcttcttgtatgtataaagttagtgtgattattgactttaacataccacctccttctcctcctagcctcagaaagaagtgttggtaactggtgagaattttcagacagattttcctttttttttttaatttaatttaatttttttttctttctttgctttcttttttttttttttttgagacagagtctcactctgttgcccaggctagagtgcagtggcgctatctcggctcactgcaaactccacctcccacgttcaagcgattcacctgcctcagcctcctgagtatctgggattacaggcgcctgccactgcgcctggctaaattttttttgtatttttagtagagatggggtttcaccatgttggcccggctggtctcgaattcctgacctcgtgatccacccaccttggcctcccaaagtgctgggattacaggcgtgagccaccgcgccaatttaatttaattttttaaagttccaggatacaggtgccggatgtgtaggtttgttacataggtaaacgtgtgccatggtggtttgctgcacctatcaacccgtcacctaggtattaagctcagcatgcgttagctatttatcctgatgtgctccatcccccgacccctttgacatattccagtgtgtgttgttcccctccctgtctccatgtgttctcatcgctcaactctcacttataagtgagaacatttggtgtttggttttctgtttctgtgttagttttctgaggataatggcttccagctccatccatatccctgcaaaggacgtgatctcattctttttatggctgcatagtattccatggtgtatatgtaccacattttctttatcactgatgggcatttgggttgattccatttctttgctattgtgaatagtgctgcaatgaacatatacatgcatgtatccttataacagaatgataataatagaatgatttatattcctttggatatatacacagtaatgggattgctgggtcaaatggtatttctggttttaggtctttgaggaattgctacactgtcttccacaatggttgaactaatttaccttcccaccaacagtggaaaagcattcctatttctccaccaccttgccagcatctgttgtttcttgacgttttaataacagcccactgaacagcaaaaaccttagtgtgaaaaacaattatggagtctgctcctgggcaatgcaagaaatatttggcaccttatatacaattatatacttttctcctgactttttgagttttggcttcttggtgtgggtcagtggctccatagtctttgtcctatacagacacaagcagcaagtccaacacatttgtagcaagagactctcctcaaatcagtataagtaaaattaggaaaatattaagatgatagtgagggccgggtgtggtggctcatgcctgtaatctcagcactttgggaggccgatgcaggcggatcacgaggtcaggagatagagaccatcctggctaacacggtgaaaccccgtctctactaaaaatacaaaaaattagccggacattgtggcgggcacctgtagtcccagctactcgggaggctgaggcaggagaatggcatgaacccaggaggtggagcttgcagtgagccgagatcgcgccactgcactccagcctgggcgacagagtgagactccatctcaaaaaaaaaaaaaaaagatgatagtgaatatatcaaaatcaatatcatcattgtgatattatactgtaattgccaaatgtaaccatgggtggaaactgggccatgtgtagaggctctctgagttattttttaaactgcttgtgagtctaaaattaaattaaaattattgttaataaaatggtcagtaaaaatgctcaggaatatgtaaggcaaaaataaggcattataaaaccttgtccgtcattatgttttaatacacatctcctcacatacttatcatttctttctgatgagaacatttaaaatctactcttttggcaattttggaatagacattaacaatagtcaccacgccgtgcaacagatcactagaacacattccttgtgtctaactgaaacttcgtatgctttcacaaaaacctcccgtttttcagtttgccctctatctctttagcctctggtaaccaccattctactctctacttttataaactcaacttgcctaaattctgcatacaagtgagaccatgaccatgtggtgttggtctttttggactttctttgaatgtgtcctgccttcagagatgtgttgacctacaagaaaaatgtattgaagcataccactataatgtgtgcacatttctgaatgtcatgtataagatacctatttttgccactcctattcagtatagtactagaggtcctagccagagaaatcaggcaagaaaaatacctagctaactaaataaaagatattcgggtgagaaaatataaagtaaaattgtttttctttgttgtaatatgatcttataaactcttagaactggggaacaaatttaatatagttgtaagacacaaaatcaatatacaaaaatcagtagcattgcggtacaccaataatgaaatagccaaaacagaaatcaagaaggcaattccatttgcaatagctataaaaagcaaaataaaataaaatagaacactgagaaatatttaatcaagaggggaaagacatcaaggaaaactacaaagcattgataaaataaactgaagaggacacaaacaaatggaaagacatcccatgctcatgtattcaaagaatacatattgttaaaataacagacagtactacccaaaacaatctaaagatttaatgcaagcccaatcaacatacaaatgccattttttcacagatatagaaaaaaattctaaaatttgtatggatcttcaaaagagcccaaatagccaaagcaatcctgagccaaaagaacaaacctggagcatcacactacctgacttcaacaccttacacagccatagtatccaaaacagcatagtattggtattttgtttttgttttttgagacggagactcgctgtgtcgcccaggctggagtgcagtggcgccacctcggctcactgcaagctccgcctcccgggttcacgccattctcctgcctcagcctccccagtagctgggactacaggcgcccgccaccacgcctggctaattttttgtatttttagtagagacggggtttcaccatattagccaggttggtcttgatctcctgacctcgtgatctgcccgtctcggcctcccaaagtgctgggattacaggcgtgagccaccgcgcccggcctaggacttctttttaacatatgtgttgagattccaatctttgtggttgctatttctttgatgattaatttatagattacaatgattattactatgcagtcaaatcacaatgtattttctatagaaattaatacaaaatatatatttaaaataaaatgagttagtttagtcttccaaaaatttttgtagtttagagattatttaaattatttgagttagcatttgtacttgctttgttctatggtgaaagctttgctaccaattacattgtaggtttatttgtttcaattcatcaatacccaatggtgtttaccaagatatgattaagacaaggttttacaatatcttattttcatcttacatatcactgggctatttaattgaaaattttattgaaataattatagattcacaagcagttgtaggaaataaaacagaaagagcctggcccatatcgcccagtttttcctcatggttacatttgcaaattatagtataatatcacaataatgttattaactttgatagatcttatatcttttaaatatttcccttgttttatttctattcctttgtgagtgtagaacccctgagttttatggattttataatttcattttaattgaacattatttaggaattatataaagtatttatgtttgtaaaaacccaaagatatatcacagaataattccatagaatcctaactttcatttctgtttccccacctgtctgtccctatatacatatgcctctgctggcttcaaataattcagcatcctttgtacactcttctgacccatgcctttttcacttaagcatatacccttaagtaaaaccatatatgcagttcaaccttaatgcaaactatgtgttcatacaaagtactgagctagactgggcgcagtggcacacgcctgtaatcccagcactttgggaggccgaggtgggcaggtcacctgtggccaggagttcgagatcagcttgaccaacacggagaaactccgtctctactaaaaatacaaaaaattatccgggcgtggtggcgcatgcctgtaatcccagctactcaggaggctgaggcaggagaatcacttgaacccgggaggcagaggttgtggtgagccgagattacaccattgcactccagcctgggcaacaagagtgcaactccacctcaaaaaaaaaaaaaaaaaaaagaatgagatcatgtcctttgcagggacatggatgaagctagaagccattatccttagcaaactaatgcaggaacagaaaaccaaacaccacatgttctcacttataagtgggagctgaacaatgagaacacatggacacagggaggggaacaatacacactggggcctgtcgagggatggggctgggggagggagagcattaggaaaaatggctaatatatgctgggcttaatacctaggtgatgggttgataggtgcagcaaatcaccatggcacatgtttacctatttaacaaacctccacattctgcacatgtaccccagaactaaaaattaaaataaaaaaaactcgttttgttgatcttttgtactttaaaatctctatttcatttatttctgctctgatctttatttccttctaccaattttgagtttaatttctttgttttagttttcttctttgttttagttttaggttttttgctttagtttcttttgggtttttttctttgttaatgtattctctgaatgatctgcccattgctgaagatgaggtgttgaagttctctggtattactgtattgaagtctatccttttgatctactaatatttgctttatgtgtttgtgcgtgccctaatgttggggtcatatatatttacaattgttacatctttctaaattgacttttttcattatataattactttctcttttttagtttttaacttgaaaaactgcattatttaaaaataattattttacctgatataaatatagctagacctgttccattttggttttcatttgcatggcatatctttttctatcccttcactctcagtctgtacatctttataggtgtagtgagttttcttgtaggcagcatatagttgggtctttttttttttcaatccattcaactactctatgtcttttagttgaagaatttcatccatttacattaaatcttatatttatagttagggacttactacttccattttgttatttgttttctaagtcttctctaattttcttactcccttttttgtggataagtgattttctctggtagtatgatttaatcctttgctttttgtttttagtatctctactataaatttttgcattatggttgccatgagacataaaaagtatcttacagttacagcaagttattttaaactgatgacaacttgactttgatcacaatgaaaagaaataagcaaagaataaactaaaaatctctacactataactcatcactccttttcttttcgttgtctcactttatatctttttatatatctcctaaaaagctattcagtcatcattcttgacagatttgtattttagtgctcacactaaagatatgaggggttcacacaccagaactacagtgttaaaatattctcaatttgtctgtgtatttacttttgccagtaagttttactccttcagatgatttcttgttgcacattagcattcttttctttcagactgatgaactctctttactatttcttgtaagacaggcctggtattgatgaattccctcagcttttgtttgctgggaaagcctttatttcgccttcatggttgaagaatatatttgatgactagaatattcttggttgaagatggttcccttcagcactttaaatacgtcttttcactttcttctggcctatgagatttctgctgagaagactgctgccaatctactggagttcctttatatgttatttgtttcttttctcttgctacctttcctctttttcatctttgacctttgagagtttgattgttatatgtcttgtgttgaatctggttggcattctttgactttcttatacctggatattcatatatatatgaatatgaatcatatatctatatgaatatatatatgaatatgaatcatatatatgaatatatatatatttggaaagtactctataattatttctttgaattaactgtctatccctacatctttctctactccctttttaaaggtaatcactcttagacttgcccttttgtggctattttctatatcttttaagcacagttcattctttttcttttttctcctctgtattttcaatagcctgtatttaagctaacaaattcttctgcttaatcaattatgctgttgttatattctgatgtatttttcagttcatccattgtctttttcagcactaggatttctgtttgatttttttttttttttttggtaattatttcaatctctttgttaaatttctctgctaaaattctgaattctttcttcatgttttcttgacattctttgagcttcttcaagacagatattttgaattccctgtctgaaaggtattccctatctgatagatctctatcactccagggctggtcactgggcagcttatttagtccatttgatgagatcatattttcttgaatgttctcaatacttgtggatatttgtacatgtctgaacactgaagagtttcttatttattccagtcttcacagtctggccttgcttgtactcattcttcttcagagggccttcaaagaattcaaaggggactgagtgctgagttccctaagctgtggtcactgcagccatttcagcactagagggtgccataatcccaagtatgcaataaatcttgcagactcctagatacccagcctagatagatgtgggaaagagaagacaatgttctgggttcccaggcaaagtcccttactctcttctctctcattccccgaagtataagaagtccctctatatataccaggctgcctgtaattgggggagacgtgacacagggactcctgtgtccatcacagctggcatcacagtaatgctagtctaaacccatggactctatgaccagcacagtactggggattgcccaaggtccacagtcagtactacctgactgccactgacgtttattcaaggcttgaggccactttagtcagcaggtggtaaaaccagccagaacttgtgtccaaccaaccaggacagcagattcccttctggcctgggttgggtctagccgcactgtccaggaagaaaggcctgggatcggtggcttcaggattctacttggcgctttattttcctatgactgagctggtactcaagttgaaaaacaaagtcatctgtactcttccctctcctttcctcaagcagaaggagtctctttctgagccacactgcctggagttgggggaggggtgtggcacactcccttggctgctacggctggtgtcatgctgggtcacatgcacccaaagtccacagccttagagaccactgcagcaccagggcttgcccaaggactgcagtccttgtgacctaactgccactcaaacttattctgggccccaggccacttcggtcagctgttggtggtgccagctgagactcaggttcctttcacgggggttgaaaggaatttgcttctggccccaggctggtgtaaatgctgtctccatgggcacaagtagaattgtgccgtgttgtgttcttctgtgcctgggcagcaccaggttccaatgcagtcccacactcacttcgtgctctcttctacaagcacacagatttttctctgcatgttggtctgccaagggatgggaaaggggtggtttaagcaatgcaagactacctttcctacccacttcaatgcctttcttcttgatattatgttaaaatcaggtactccgatcactcatctagttttctggttcttatgaatgtgctttcttgcatgagtagttgttcagctcgtgttcctgtggggagaaaattgatgaatgtttctctttggccttcttgctccactgatttttctttttctagatttttacataaattgaatgatactacatgtaatcatctgcatctggcttctttcactgagcttaaggcttttgagatttgtccatattatgtataggcatccttttatattgctggatagtgttccatttcatagagatgctacaatcgattgctgccatggacattattgtgcatacccaaaatttatatgttgaaatcctaaccccctagtacctcaaaatgtgatgtatttggaggtaggactttaaagaattaagttgaaatcagcccattaggttggaccctaatcttaccagtgtccttataagaaattaagacacacagagacaccaggggtacacatgcgtacagtgatggccttgtgaagagacagaaagagggcagccatgtgcaagccaaggagagtggcctcagagaaatccaacactgccagcatcttaatcttggactttagaattgttagaaaattaatttctgttgtttgagccacccagtctttggtattgtgttatggcagccctagaaaattaatacaattactcattcacctatggatggtcatttgagaattttttttaagtgttctagttattggttagatgtgaagtttccataccttctccccacaaagtcaaggcacatcaccctcctggtacatcaacatgttcaccaaccaggaaactccaccaagcctctgcgtcaagagttctaagttggtagggaggaacgaggagggggtatctcattttgtagctgtgattaaatcacaaccacatggctgacttcaatctctagttcctttcctctccccaaaggtcaatctggctcaaagtttcaaccctcttattacatggttggtctttctgatgaagagcccccattctgaacctttctaggagcctataatgaatcacttcgttagtataaaaaatacacttctctcactcaaagaattacaagatttttgtagtactaagcctgggacaaagatccagatatattttttattacaccacagactgtatttaatataataattaatagattttctactgttaaaccaactttaagatcctaacaaatctcaaggctgggtgcggtggctcacgcctgtaatcccagcactttgggaggccgaggcaggcaaatcatgaggtcaagagattaaggccatcctggccaacatgatgaaaccctgtgtctacaaaaaatacaaaaattagctgggcatggtggcgtgcacctgtaatcccggctactcaggatgatgaggcaggagaattgcttgaacccaggaggcggacgttacagtgagctgagatcgcgccactgcactccagcctggcaatagagggagactccgtctcaaaaaaaaaaaaaatcctaacaaatctcactagaatatgacttattctttctctctaagagatatatagatatatgtattaaatatctttagtagaggatttttcagatctcgagtgagcctggtcagttggtatctttcaatggatttttgttttccaagtttcaacttactgagaaagggttgtttaaaacaatcacacattatccattatatgtttcaaagttatctagtactatactatgtttcattgctcctatctgtaatatgtgatttacgttctttctgattaaaaaaaggagacaccttgaataaattattaaaattgatagaccttccactatatcagaaagaaaaaacatgggttcatagattttctcaaaaaagaaaaaactaaataaggttactgtgaaaattaattctgaggccctagtacaaagatggagagctcagagcccaaaagtcatcctgtgttaaggagacatagctaagagtctcggtttgccaaggtagctggagtctacagagcagagtacaggagagaaaaaacttcagagatatagagggccatccccaagtattcagctgagtataatctgtgtttgcatatagaaaaagaccagaggatgggtaaagaaccacctgaaaggattatacgggaagcaattcccaaggcttatacagaaaacatgatagttctcatttcaaccagcttgagtaaaaaaaactcataactcatgaagcattaggtagagaatataggaaggttgtgtctcagtaatgggaggggaatttgtcttaaaatgtatgctgcaataatctcatcgagaaatgtttagaatcaagactccccaaaagatcatattgtttccaagtaacttaaccatgtaacagaaaaaagaaatcaagaatatctatagaaaattaaaaaaaaatcagtacctaaaattcagtgtccattcaaaattaaaccatgttaacagtatcagacaagggagattttagagaaagaatattaccagagattaacaggatcataatgataaagtggtcaacacatcaagtggacataaaataggaaatatttattattcacctaataaaaacatactaaaatatgtgaagcaaaatctgacagaactgcagagaagtaaatccaatttaatattcagagatgtcaacaatcctcttaaaataattgctggaaccaaaaccacagaatgtcaataaagatagaaaaaacttaaataacatcaaccatttttacctaatcaacacttgtagaaccccttcatcaaacgagagtacagtatacatttcaagtgaacatgtaactcataccaagatagcccatattctgggccacaaagcaaatctcaataaatgtaaataattcaagtcttaatgtactctgaccacaatggaattattgcagaaactaccagaaagataagcaaaatccccaaatatttaggaattaaataacatacatttaaaaagagccatgtgtcaagaagaatttttttaactggaaaacatcctaaactcaactaaaatgaaaccacatcggctgggctcacgcctgtaatcccagcactttgggaggctgaggcaggcggatcacaagatcaggagatcgagaccatcctggctaacacggtgaaacctcgtctctactaaaaatacaaaaaattagccaggcatggtggcaggcgcctgtagtccaagctactcgggaggctgaggcaggagaatggtgtgaacccaggaggcagagcttgcagtgagccgagatcgcgccactgcactccaacctggatgacagagcaagacactgtctcaaaaaaaaaaatgaaaccacatcaagcttgatgggaggtaattaaagcagttctcagatagatttttaacattaacatctcttccccatattaggggaaaaaaacccaaaggtttgaaatgaaggacctcagcttccatgttaaaaagtagcaaaagaaatgaaatccaataaaagcggaaggcattagtaaaactcaaaatggaaaagaaaaatcccaaaatatcagaaaacagaaaattcaataataccaagtactttaagatcaataaaattgtaaaattgataaatctctacccaaaccaatcaaggttaaaagaaaaatatagacattaccagtatcaggaatagaagaggttgcaccactacaaattctacaagtatgaaaataatattttgaaaaatttgagtacttaaataaaacagaaaaactccttgaaagacacaaaccatcaaagctcactctagagatagatggatggatggagtgacaaacagatggacggacagacagatgtatatataactagtatagccctccatctaccatggaaatcaaacttgtagttagatgctgtcctacaaaacacacttcagggccagagtgacagacagacaacacacacacagacagatgtacatataacttgtacagccctctatctaccacagaaatcaaacttatagttagaaactttcctacaaaacaaactccaggcccagacagcttccttggtgaattctaccaaacatttaaggaagaaataataccaattattcacaaactcttccagagagctgaagagcaggaatacttcccaacttactctataaagctggcattatgctgataccaaagccaaacctgggcaagatataaaattacaaagaaaaaaaagcaagcaagcaagaaagaaagttagggacaaatatcactcgtgaacattggtgcaaaacttgttacaaaaaaacaaaacaaaacaaaacaaaatagcaaatcaaattcaacaatatactaaatgactaatacatcatgaccaaatgggaattattacagaaatgcaaggttggcttaacatttaaaaaaatcagtcaatgtaattcatattaaacaactaaaacagaaaaagaaaaaaaccatataggattatggtcaccagagtccaagaaaacgccccacaaatccctattttcacctttgtgtagttctcttccacttttaaccaggattagctagggttacttatgaaatatagcagaaatgacggctcatcactttcagtttaaggtaatgacagatactgtggctttgttcttgtgtgagttctctcctggatcacttgctttgaaactatttctctacaatggaacactcttagcaaagtacaaatgaaaagaaatgaactatgaaacacagaacaccaccatgagccttaatttcagagtttaagaagccaaaaacattagaatacatattaaattactctatctctgtagaattctaggaaatacaaacaaatctacagtgacaacggatcaatagttgcctggggatgggtgaaggaaagggagaaaatataaaaggaatcaggaaacttttggtttgagaagtgccaacatgtatcaaaacttatcaaatggtacactataaatatgtgcagtttattgcaaaaatgtttagactgacttctggacagtaaccttagccataagagacacaggtatggaaatatttctgtaaaccctcataatggagccagagtaatggaaacacatgtggatgtacctttagaagggtcatattccctatagtttgctgcagttttctcattcctttattaatctgggtttctgcaccaactatgattcctacctgggccttctggaggacagccaatatcaactgcctactgaaaaatagacttcagagatcttgacatgtccactgagttcaaattctcctcaagaagccttgggaatatgaagtatcttctgggaacaagggacgtaattcatgttgctcccagacacattagagattatcacaacaaatgcccactgcttagggtgacctcaattacacaaaaaatcttaacatatagaccaaaagattaggcctacaaagactggcattctttcctaggagagctgaagcagtcaagtaagttagcttgacactagcataagagctagtctttgccatcctactatcacttcagagatacagatagttggagctctcacaaaagctgttcttcccttcatactggcttagctcaattctgttctcaacccaacccacaaagcgaacagaatcctcaagatttcagatagtctaaaaattaaggcatttgttgcaaaaccagaatatgaggcagccaatttcaggtcaggtgtcttgaaggctagaaaaattcgtcccaagtgccatgtgagatcaactatatccatgaagggaaacctctgccagtggtcagcagaacaaagctcccatttttctggctaaaactgggtcatgctcatgcttaaaccagtagtggggcagaaaaaaagtgagaatccttgatggcctcaggctactgatgattccctccagggaagggaatagtacagaggtctgtcttttgaaacacattggggttactttggcacaaggcaggactcttccagcacaaagacagatggcttctaacaggcactgccttgacgaaattccagcaagagtctagaaaattcagcatagctccagaaggcttcccatatagctggcactcggaagaacctccccagggtgagtgtttgagtgtataaagttctacttctggctgtcggctacacataaaggctatgcttggagcttctctctgatgtcagttattatgttgaacaaggaaacggaattatctcccatcctaaggcctttctccagtgtgaattttccagtggcggatgagggaagccctctgcctgaaggccttcccacattcactgcacttatatggcctttctccagtgtgaattctatgatgctgaacaagtacatgtttgtggctaaaggcttttccacattcactgcacacataaggcttttcaccattatgaactctttgatgtgcaataaggtcagagctttggctaaagaacttcccacatgcgatgcactcataaggccttgctccagtatgaacactccaatgtttaatgagtctgtatttgtgaccaaagtattttccacattcgctgcactcatatggcctttctccagtatggatactctcatgctgaacaagtgtagatttgtgactataggctttcccacattcactgcacttgtaaggccttgctccagtgtgtactctttgatgtacaataaggttagagctatgattaaaaactttcccacatatgccacactcataaggcatttctccagtgtggattctctggtgctgagcaagtatgggtttgcggctaaaggttttcccacattcaccgcactcataaggcctttctccagtgtggactctctggtgttgaacaagtgagtctttgcggctgaaggttttcccacattcactgcatttgtaatgcctttttccacagtgagaggcctcctcacacttggtgttgctgtgtggcttccactcattgtgaggggcatggtgctcgaaaatgcttgagctggctaggaagtccttacaagcctcccctgtcacaaaagacatctccattgattgcacagcacagttgttcagaagaaagggcctgctcttatcacttctaaagggtttctctccactgtgctgcttctggtgctggtgaaggtttgcactgaagcagaactgtttcccacacagcacacacatgtatggtttctgccctgggtgtgtttcctggtgctcagccaagtgcaaaatgtcttttaagaccaggccacatgtcccacaggggtaagccttctgagtagaaggacctcccttgggaatcctgatctgtgacattcctatagaaaagctctgctcaaaaggtatctcttcatcctccattccatgccaacaacctgaaagcagagaaatgctggtgaagtacaaattgacacaggtggaagaggggaagcctcactacaaatatgtgtctaacacaactaagaccaaggtcataggactgttgttaggacaagggtccaaactcaagttcagcaaatgtgtactatacggtagttggcatctaaatgtcatagaatggagaaggcctcaactgggagaggacaaagatgtggggtacagcacaaaaaagaggcaggtctcaaagtcattcacaatcagattttcttggctgctggggacaggtgagagttgtgcagaaggttatggtccataccaaagaaaatcaaattgctactcagtagttggtgtttaaggactatttgggctacacatctcatgaaacactaagtacaggccaatgctggaaggcactgtagaacaagccatggagaggaacaggtgagacatgaaggcagaggtatggaacatccagaggccaaaggccagagtatgaaaggccagtggccttagcactaatacaactgtaggcacaaagaggctatggaatgatatgaacccagccctgacatcacacctttccccagctcctactcaccagggtcactcccacctggagtctctgtggcaacagctagggtcatgtccacccagtcaggtacccagggctcactacccatcaccagtgaggcaactatgtgggacatgaaagatgtatgtcctaagggaaagatagaacagcactggtctgggtaacccatatagaaaactaaatattattaaaataatctcagagtaaggtcttgcaggaatagtgcagtggtcctagcaagtagcgaccataatggtccctacaattcctgacataggcaggccacaggaaatgtcagctaaaggaagagcgcagaatcccaggcacagaggtgtcatggatacagacagaggaattcagacagggaaaggacaagatggatatgacccactgggctgacaatacaatgcataactcctgaatccatgcctgcaaggctctgagacagcaagcgctgggaatgctcaaaaggagaaagtaggagtgcaaacagcccaagcccagcactcacagaacctactccaggcactaagaaatgagacagtgtccacggctctgatgtaggaaggacaaagatgccctgaaaaaaaggggaagggcaggacccagtccaagtcactggggtggatgtgacggccttacccagagaggccataagtgcaaagttctccagcatcacatcacggtacaggagcctctgagcctcatcaaggagcacccactcctcctgggagaagtacacgaacacgtcctcaaagttcacctgcccctgccacaatcaggagagccaagtccatgagcagcatctctcccaagaacccccatccgtgcccccacacatctccctcctgtacaccctcctacctaactcctcaactcaggaaatatcaggaccagatgtcattggtgtcttctctcgcctcatggtcccaatggatcactgtgtctacccatagcaaccacaggcaggtgaagaagttgtcaccctctaagctctgtgcttagcatacagggcctcacccttctgtaagcaaattcctctggggtcactaacatcatgcttaccagacaaccaaagatgggcttgcctttctcctttaagcccagacgtcatcagtctacacttctttccatatgtacatcactctttggatcacagttatctcacaactctggctctccaccatcactttcctggctcactaaatgcactaccactgtgaaatgaatattctcttttaactcccaatctacataatcatctttaagccatttcaggatgattcccgcccccttgctcttggttcccaccagacatgacagagacctgcaatttcttgaaaactcccttctcagtctcacctctaagtattttgcacaggctggttcctgtgcctggaacaaccttccaaccttattccaatggttggcagaaatggaaacccctccataaaacccctggcccggagtcaggaccctgggcttggggcttctccagagtcctcagacccaagagatcggagagtagcaggagagtgttctatataacaccacaatgctggagagcgtattgggtgggggtgggatcggtgagagcatggacattctcccctcacctgtatagggtccacaattacttctgagttcatgggaacctgtggggaagagggagactatgcgagtcaagcaatcttgaaggaaccccaaaggctcaaccccatcccatattcctacccagttacaatgtgcctgggagctgaatgtctaccctctgtgcttccatcttcaaggatacctcttaactgtgttagctcggaacagtgctcattatccgcccccatggccaacaagagtctgccctccatgagcagtctatggaatactttttaaaccctcggattctggctctcctctgttcagaaccttccatggctcccatcaccctcagaatagagacccagctgctcaggatgatattccaggtgcaatcacttataaagcgctctgatcctttcagacactaaaggcccagttttcccaaatgctccagctgtgaaccatctctgagcctttgcatacactggtctctctgcctggaacgtccttcaactcgtgctgtcaaaatgggtcccaaacacgagcgcccccactgttctagatacaggggcctgagctgcagtaacccgaggaatcgttcattcgaagctttgggattcagagatgggggtcagcgcgcagactcgcagacgcagcacccacctgtgccgggcccatcggctcagccgccgccatcaggcctgtggactacggaagggtggcgacaagtgcaggaacctgggatcagctgtccagggcccagcccagcggctaggtcactcaggcagcgccactgtcaagcctcaggcccacctctcttcagggaagaagacactctctcacgttttcccttttctgtcacctcaggtctgacattgcgttctggaaactaaaccagtggattaatggaaaagcaaacaaaatgtccacccgaggatggtagaggaagtcccgccctgacgttggtgaggaccaacggaaacgcctatttcctgggttttcattggcccagagccgccaagtttcctgggtaatgtagttcccacggcaccaacactagtaagcggcgtctcgcttcacctccaggttaaaagcccagagaagaccgccaggggcgcgtggaaatggtgtccctcgtctccaaggcccagacggagcttagcttcctcttgaaggagccatatctgtatttctggtgaacgtcgtgtttgacatcaaaggaatgtttagagacatgatttcagccttccttacgcagagaatgctcatcaaaaaataaaatggacacaccatacactgacgtcactcagatttctatggctggaagttaacaaatattgttttcaaatgcgtgtagcctgatgctccagagttagtttggcgagcctcagcattttctgtcaggcacaagaaagaaaagactccagacaccatgatgtggaacgtggagtggggatgtttggtggccttgaagtaagtgaataacccttctgtctgttacctcagaaaatatttatcctgcttatacagcagtgattgtgtcaaacccaacaagtaatactcttgttcaagatagtatttcatactccatatacagagatgtattcaatattttaagtgttttacaagtgtctgaaaagacagaattcatcaaatgtcatatggcaatgaaaagggcaacatgaacactttctgtaaagaagaaataaccaccaaactagatgtctatacacaacaaaatgtcttttatggaagtgtgatataaaactatttgaaaccaaaaatgataaatgtaatggaaatacatttacacaaaaaataatgtttaaaataatactcaaggccaaagaaagttgatctcaggtgaaaagtctgcaatgagagaagaaatgaagatgaaaagaagtgcatcttttgattaaaataacagcatattacagtgtaaaacataagtagatatacttattgagttagaatgatggaattcccgtgcgtaacctcaactacatataaattgaaaggaggctagttgctcaaagttttaaattttttatatttccaagtggaaagcaaatgtattacaatcctgtatggcacgctaatgtgttaaacgtttgtaatttttagcctaaatataataaatacagtcagcgtatatacttttcaaactagaagaggaaatgtttggaatataaataaataatcaatagaaaggtaaaataatagtaaaataagtggaagaagtgaggcaaagaaaagcacaatgtaggatatatttaaactgtcaacctaaataacagagattcttcaaagatgttgagttcattcaggaatgcacaggggatttgcaaatccaggacatgcaggctatagggactataggcatatccagagagcttgaaacaaggagaagctttcaaaggcaaaagggaaaagtatatataatttgttttgagataaaaagaacattggtcacagatgtttatggcagaggttaacaccagttcattagtggagacaatctgtcaggcaagtgttctactacatctagagctgtccttgtaactcctgtagcaagctgcggtttgagaagttcttgtcaaaacttcttttaacgggaatatgtgcattaagagccctcagagacagtaatagctcttatcttaagcatgtgtgtttgagtgccctcttttctcagcctcctggctttatttatttatttacttatttatttattttacacaagttactcattttggttttgacaacttttgcaaaacctaaatgactatgcaataaatactcaaataagcagttagtaatttttgatggaccaaaacacgcttcacgaggtattctcttttcttcagtgaatttccacagaatttgaattgtgattgaaagcacaactaacattcccagactccctactctgtcagtaagaaaagaatcatgttgtagttagaaacgtccaaaatctgctttagagaaaccaagacctacgcttgaaggttaccaggcccttgactcacccaactgggctgagatgtcatcagggaactgcatatcatcagcatcttctggttattcatacaggggtgggataaggatgacaataatttacatttaataatgtccatatcctagacattctatcagaccttttataaacactacgcacttttgccctgtaaagtggatttgtcacctaaattaatatgaggaaactgaggtttcttgggtctataatttattttcagctgtagctgttaagtggcatagttggcaatggagtccaaggagccatgactaactacttcccagcatggcctcctaccctaggtcatctatctgggtaggttcagagccctttctatgttagacaaacaaggctatgaaaaattcaatgtcccaggcagctgacatgaggacaagaatgtgtcttgccttttcttcaccacagaaacatgaaccttcagcttcatttattccctaaacgtgggttccttggatgccaatcaagaatcaaaacaggaaaagtcctgctggcccacaaatacagagggtttgataggtgaaatgttattgcctgagcctcaccgtatcatcccaaccacccacatatcctgttacctctgcctcctaatatgtctcaggtcatcttcttctcaacacctccaatttcatgcccttgggccaatctgccaacattcctgagctacacaatgccttctgccttgtatcctacatcagttttttctctactttagttcattctccacatatcatgcagaagatgacttcaacacaaatcaggttctatttgggagaatcagaagcatgttggtggctagagggggaagggcttccctccaaactttagtgttataacatggtttagggttataacctgtcctgcattttcagtggtcccaccagtaatttctatgttgtcttttttgtcaggctcattgctactgtccagcccctaggatttcttcctcagcagaggactcctgtaatgcccctgactcaatccacattctcttcctcctctctcctttacagcaagaactaaaatcatttccttgcagacctaggccagcgaacaggagattcacaaccatgttatcgatttggtgctgcccttcacacttcatggaacatgaaagctcagtgagggtctgagtccacttcccagcagagagagcatagccatgtgccatttatgtgagagtgcaatcttggtacatttagagtaactgtttaatccaatatgcagatggatggtgttcaattaggaattctcaaaatttttttaaaaagaattctcaaataaaaatctcatataattcctattccatttaaagccaatgattttgttttcctgtgctttgaaactagaacatccttgttgtctcaatcccaagacggaagccaagctaaaaaacaaaaggagcaggacttcacagaagccctaaggctcaatgaaggatgggccattgcacattgcacagtctttttaaaaaaacaataattgtactgctatccacacatccttgtgagtcatttctcatcagacatatattctaagccatatgcagtacatacagctctaaattctagtaatcatcctgacagaattctaatgaaggaggtggatgagcatttaccagattcaaatgaatgcaaactgaaaaataggcaaaactatgttagatgacaatgtaagaaatcagacatgccacaaattagacctccttgatgggtgaatgacttacagcgggggttacagaaatgctggtatggctgggcgcagtgactcacacctgtaatccagtactttgggaggcctaggtgggcagatcacgaggtcaggagatcgagaccatcctgggcaacatggtgaaaccccgtctctactaaaaatacaaaaaattagccgggcatagtggtgcgtgcctgtagtcccagctactcgggaggctgaggcaggggaatcgcttgaacctgggaggcggaggttgcggtgagctgagattgcaccactgcgctccagcctggtgacagagtgggactctgtctcaaaaaagaaaaaaaaaaagaaatgctggtatactaacactgttcttttttgattggcacactgcttttagagatgtgttgactttgggaatattcattgagctgtacaactacatgttaatttttgtgaatgtcatttgtaaattaaaatttaccaaaagttcatgctaacaaacccgaagtgcctattccatattgttatgcaggctggatgtgatggctcatgcctgtaatcccagaactttggaaggcctaggcaggtagatggcttgagctcaggagttcaagactagcctgggcaacatggcaaaactcgtctccgcaaaaaaaaaaaaaaactagccaggtatggtggcttgcacctgtggtcctagctacttaggaggctgaggtgggaggattccttgatcctgggaggtggaggttgtggtgagctaggatggcaccactgcactccagcttaggcaacagaaggagaccctgtctcaaatatatacgtgtgtgtttgtgtgtgtgtgtgtatataattctccaatgtagaataatatatatattattctccaatgtggaataataattaataataatactaataattcttgggcatttacccaattgaaataataattcttgggtatttgcctgattgaaatgaaaaactgtctttaagaaaaattcggctcttctccctttaagaccagctctgcctctgcctctgcctctgcctctgcctctgcctctccctctccctctcccctctcccctctcccctctcccctctcccctctcccctctcccctctcccctctcccctctcccctctcccctctcccctctcccctctcccctctcccctctcccctctcccttctcccctctccctctcggtctccctctccctctcttgccatggtctccctctgatgccgagccgaagctggactgtactgctgccatctcggctcactgcaacctccctgcctgattctcctgcctcagcctgccgagtgcctgcgattgcaggcgcgcgccaccgcgcctgactggttttcgtacttttttggtggagacggggtttcgctgtgttggccgggctggtctccagctcctaaccgcgagtgatctgccagcctcggcctcccgaggtgccgggattgcagacggagtctggttcactcagtgctcaatgttgcccaggctggagtgcagtggcatgatctcagctcgctacaacctccatctcccagccgcctgccttggcctcccaaagtgctgagattgcagcctctgcccggccgccaccccgtctgggaagtgaggagcgtctctgcctggccgcccatcgtctgggacgtgaggagcccctctgcctggctgcccagtctggaaagtgaggagcgtctctgcccggccgccatcccatctaggaagtgaggagcgcctcttcccggcagccatcccatctgggaagtgaggagcgtctctgcccggccgcccatcgtctgagatgtggggagcgcctctgccccgccgccccgtctgggatgtgaggagcgcctctgcccagccgccccgtctgagaagtgaggagcccctctgcccggcagccaccccgtctgggaagtgaggagcgtctccgcccggcagccgccccgtccgggagggaggtgggggggtcagcccccgccccggccagccgccccgtccgggaggtgaggggcacctctgcccagccacccctactgggaagtgaggagcccctctgccgggccagccgccccgtccgggagggaggtggtggggtcagccccccgcccggccagccgccccgtccgggagggaggtggggggatcagcaccccgcccggccagccgccctgtccgggagggaggttggggggtcagccccccgcccggccagccaccccatccgggaggtgaggggcgcctctgcccggccgcccctactgggaagtgaggagcccctctgcccggccaccaccccgtctgggaggtgtacccaacagctcattgagaacgggccgggatgacaatggcggttttgtggaatagaaaggggggaaaggtggggaaaagattgagaaatcggatggttgacgtgtctgtgtagaaagaagtagacatgggaaactttaaaaaaaaaaaaaaaattcttccagtgatctggtagaattgtaagaaaaaaaattctttaatcctaaggcaaatatacagtggttttattattaatgtacagtttctgacaaattattaacacatgaggtgtattaactatgatatatacagacaatgggatactactcagcagtataaataaagcattgctacacaaaacaagggtgaatcacaaatgcattacactaagtgaatgaggccagactgcaaaagctacgtgctgttggattccacgtatgtaaccctggaaatgtgtacgttcctaaaactccaagaagacagaaatcacatccatgatcctggggccaggagtaggggaacgaattaacctcaaagtggcatgagagaggaggagagagctgcaaactgaccactgagcacaatcatgtccagtttctcacatcactgctttccgcatgccctggtccagccactgtgtcttccttcctgttactgcagctcactaagttttctcccaccacatctctttggcacttgctctaccttttacctgaatatgttaaacttggttctttcatagctgcctccttctcatttttttttttttttttggtgtcaactcaattatcaccttcaagaaagccacccacatccaactcatctgaatgggcagtgtcctcagccttcagtttaaacatttccaactctgtcctcaatacaactgccattccctcacattctccccttcatatcccctattattttcatcactacttagaacaacttctggcatttgttatttatgtttgtctgtttttttaccattctaggttcagtttccaggtagaatgtggacttggcaaattctacaaaaccagaccaatattttcaaggcttgacctgggaggagagaatggtgtatttgggtggtatgagcagaggaaaaaactttttctcagtattttcagtcattttctggtgagtcagtgttcagcagagcaaggacatccaggtaagtctcaaagatgtggtatctatggaagagtagatgattgtagtggttaggaatagctgtactcttgagtagttggtgatcgtggttcctcagttccactggagcttccgaagagtttataatcaccaagccaacatctgctgggatggtgtctttgagcataagactatgtttgggcaataacaggacatagggctgcttacctgttgtagagcagaactgctcttctgaaatattagtctccttcctcgttgaggaaatggttatattttcccatcctgtggcctcatctccctgcctacttttccttataaggatagttcagatgggttagtcttggctctctagctgaggcgaccagacttcaagtgtctgaggaccaggtagccatctccatggaagtccagagtttccagagctgctgggtggtgacttcttccgttaagctctaaccttggggagggcaggagatgtcatcaaaatttgtttagttggttacagccctcagccttccctcattccctgcagctgctcatgtgttgagggttgacttgtgattagaccctgaggtgcatctgcttttcatgccatcttggatgggttagacttcccaaacacagaggaatgtgcttgctagccctgaaggagatatggccaaaggtagagtcttggactcaaactttgatgttcacactccttatagacatgtaaatattcctaaaggttggaaataaaaatagattccagaagttagagagaaaacatatagacccggcatatgttgcttttaaaaaataaaatagcttcatgggatttttttgtgaattcaatgagatataagtgaatttcttatgtagataatgattttacctaaaccaaataattagatagtctacttggtcctcaccagtcatgttatttgcaattctacatatgagcctgctttagtgggttgtctcttcctgtgataaaattaaaatgtctacatatactctttatttcaaaactatcacacaattcactacaactttcaaaagaggtatagtttgttttttaattaaaaccacatctgtgaaacaaccagtagtgataaaacatagtttctttctttttttttttaatttatttttttgagacagagtcttgctctgtcacccaggccggagtgcagtggcacagtctcagctcactgcaacctctccctcctaggttcaagtgatcttctgcctcagcctcctgagtagctgggatcacagtcacctgcccccacgcctggctaaaaaatatagttcctaggcatcctttcttttcacatcacctcacatgcctgatacaccccattaagctaacatttgcatgacatttttgttaatcattttgataatcattctataaatgtctttatagttttactacatacatatattttcctaaatgatatactgtttcttatttccagattctgaattttctatacattttacactgtatgggtgactagattctataatatgttttttaggtttgtccacaaaggttcctgtcatgatggtaagctaatttccataatctattagatgattaatccagaatctgctcttctaatagatgttctcaaggaagtgaaacatttattcctgtgcttggtttcagaaggaggatattatttacatattgtcccactcctgtcatggactcatctctcctcactctcctcctcccctcccttccatatgccacataatggtctaactgaaataactaatgccatagctgccatggaaggggtaaagagcttgtgtctctctctattctaccatgttctcaatcccaatattgactcccctcctccttttcagagtcaagtagtactgaacacccagttccagaaagctccaagaaggagggagggcttcattttctcttgtcctcataagtcactccaatgctgtgttgaaattgatcattattcagccaacagatggaaggggcaggaaaagaagtagggaaattagattgacacgaggggactagattcaatgggaatggatgtagtgggactacacataataaagggttgacatcttttttttatcaatagttgtgtgttgtaaacaacagtctagcattctacccacctgtgaggaactggctttatatttggaaatggaagagcagtgggaacatggagcataaagggatgaaggagagaaatggagggggagttgcctcatgggtttgccgcctattgttgtgcctgtacaccaatgttgggtctttgaggaaggaaggagcacaaatgagcatgggataaaggaggaaagtaaatccttgggctcccatactctctcatcacctacatccagaattcagagccttttcttattgtcatacatcaggcattgcttggccaccgttaattttaatattgggtgtccttttgtcaaaggaaatttggggatctatacgtggctcttcccagagaaacctctttactgtggccctgaagatcctcttcaattccttcaaaagaaggaaagattggggtatcagctgcaggaaactgaaatccaggcccatctccaaaaacagcagtttctggatgagtccgagagaagttctcaaccctaatttctcctccatctcctattccgttatctccatctccatcatcatctccatctccgtctccatctccatcatcatctatcatctccaatctccatctccgaagttatgcccacttcctggaagtttggaggcacgggaactacattgcccaaaaggcgcagcgccgcgaggcggcgatccctgaccaatgaaaagaggtctgcccgagcgtgcgacacgcaatgggcgggacttccggcgtctcgtttggtattcactttcgcgactcaggtgaactaacctgcgagaagctggttgtgcgctgaggcgaccagcgccggaaggcacggtggcgactcacgctgttctcgccgctcagaggcgggtctgaggctcggtggcggcgcccagggtggcccgggccctttcctcggtcattgtctcccctccagctctactcacaggctccgatggcggcggccgccctgagggaccccgctcaggtgagcgccgcgtcctcctggcctcccccgaatcctaaagccctgtgagggccgcctgctcaggtccccgggtgcagaactgtggggcgttcgtgcgcggcgtcccgtttctgacacgcagtgtgatggggtggcaatggagggcaaggggcccggctcgcaaagatgtgaggcgcattcagcgagtcccgaacctgaggcctcctggtgtctgtagtgggcagcttgggaagggacgaggcgcgtgtcgagcgacagcccgagcagctgcgctttcatcctgagggggccacagtggccgcggagggctggagacagaagagtgacaagatctgtttctcaaagtttgccaaaggcccttcaagtcaaaacagactggggtgggggtgaggcgggtgaagacagacctgtgagtaggtaaattcagtagactagtggagagtctactgggactgggccacagaggaggggaagtgatcagatcttggatggatatcaaaaactgaacagacaggaattcctgttgcatcagatgtgactgaaagaaagggaatgaagagccattctggatttttatttgtatttttgtttgtttgttcctgaatatcaggaaggatggagatgggtaaggctgtgcagggagtaggttttggacatggtaatcctgagatgacccagagtggaggtgtcgtgtccacatgggcagcttgcccactcacatctggaagtttggggagggatctgggctggagatatggtagatatgggctggttgggtagaggcctggactagggtaagtcctggggctcctatttaggagggagaatcttaaggttccctttcagatgggccctaaggtgagagaagggagagatggccctgtaggacggggctgcctctatagcatggagttttgtggtcagaagtggttctgtctggtgtctgccggaatggagggttatagagtatgaagacccaggactgcatggagactgcagtgttgagtagtatataggtttgccactccaggctcagcagttcctcatgtacagtccgtatggacaaaaggaaacgtcagccaggctgctggagcagcccctttggtgcctaagtttccctagccgtcagcacaggagggatgatcaactgctccagtagaagggctctcagcaggatggtcttcaggggagtatatagcaggcagccaggttgccaaaaggaatggtatgtgctcaggtttctcagacccaggtcccagtttattaacttgtgaatttatgaggtaagtatttaagcactaattgatcatagttcatatacacacaggggcaaataaaacaacacggatttattaagttaaactgatgtaagcacttcataattggttgtaaagttagtatactggaaagtatttgattaaaataaagcaccttaagtatcacattcttaatttaaaagtaagtttaagaaacccatattttctttttctttctttctttcttttttttttttttttttttttgagacagagtttcgcttttgttgcccaggctaaactgcaatggtgcaatctctgctcactgcaacctctgcctccctggttcaagcgattcccctgcctcagcctcctgagtagctgggattacaggcatgcaccaccacgctcagctaatttttatatttttagtagagacgaggtttcaccatgttagccaggctggtctcaaactcctgaccttagacgatctgcccacctcggcctcccaaagcattgggattacaggtgtgagccactgcgcctagccagaaacccacattttgaaaacctaccagtttatttgcgctgaaaatgttgacagaagcattaattatgtgtacagtaagagttgatacttagtcctagacacataagaatgagtttgatacaaacaatcgtcctattgagtaaataccattattattgccatgttgcagatggcaacaccaaggcacagggaagttgagcacttttccaagggcacacaacaggtaagaggcatcactaagaaccaaagcccagattgtagatagtcaggcacacctgactccaggctagacgagtgggcttggatgatcctttggcaacatcactgtctggttctcatagtcttgattttccataggttcctgtggctgcagacttgcttacagaccatgaggaggtaagtggaggatgtctcaggtcctcacactcctgcactcctacctacatggtcttcagaattatggtgtcttgaggctccttgctggctattctccctacccttccatttgagttccctggaagatggtcacacacagtcagggccctgagtccagactatatattatttttattattttcttttaagacagagttttgctcttgttgcccaggctggagtgcaaaggcgcgatctcggctcactgcaacttctggctcctgggttcaagcaattctcctgtctgagcctcccgagtagctgggattacaggcatgcgccaccacaccagctaattttggatttttggtagagaggtttctccacgttggttaggttggtctcaaactcctgacctcagatgatccgcccgccttggcctcctaaagtgctgggattacaggcgtgagccaccgtgcccaacccagactatgtattctatggagaggttctcatttctggcaaccaatgacaggaggtttagaaggcatagtgatcaacattagaaaatacatggaggtaaggttgagctgggaatgcttagacaacctcagatctccattatgtctgggggaagcatcagcgggtataaggccaacatgaagtgattggctgaggagctgagctgaggtgtcctgatatgtgtgcaattccaagtagctaaagatgaagcaagaaaaagagccaaggagggaggccttcaaagtggggctgaggattggccctggcagtcagtgccattgggggtctgggatggcacggagttctgattgcatttggtaagtgccctctggatgccatgtgtagactggcatgtggtgacactaggggaagcacatgaggtgatgtagagggtagtggttgtggtacaaagtatgtgcacattctaataagtgtaaacagatgtccccaggaccttgtactgggggcttcagggagaacactgacacaaatttgattgtatttgagaaacacagtctaggggatccaaggtaaattgtctggcaagagaagagtaggactctgcataccatgcccagagctgagatggactttatctgcctacctgcctattgttgctcagtgggagcatgaggagagagtgggcatcagtggctctggggcagggtctctcctctgagatggggattaaggaagagggtgagcaggggtggatgtttaggcagatgcctaaatttcccagtaaggaggctgcagataaactctactctgtccatcttagcagggctatgtgacctttgaggatgtggctgtctacttctcccaggaggaatggagattgcttgatgacgctcagaggctcctctaccgcaatgtgatgctggagaactttacacttctggcctctctgggtaaggttctcacaccccaccccagcatcctgagctgggctcggcttttcctccttttcctagggagaggtctgttcttcccaaagctgaactgtgggcactcattccttctccagtatcctgaagtagctattgtaataggcctgggctgtgtatactaccaccttctctccccaagctgccccacagctgtgcaggaaagggtttgggggtcaggagtcttgcagtcagcttgatggatcttatccctggtggcctctctgtggcctggtgacactgtgcagatctgtggtagttctattcccctacattctgcctgtctcctctagccaacatacctgggtgtcggtctgtgccagcaattgagtcaccaatgtgattgctgtttgactgtgttgttcctgcaagaccctcctccaaggttctttctgtactattttgttttctttcctgtggtccatgatgagataagtcattctggctcagtgctgccactcacctgtcgttttccttaggacttgcatcttccaagacccatgaaataacccagctggagtcatgggaggagcccttcatgcctgcttgggaagttgtgacttcagccataccgagaggtagttggtgggtggagctcagggaggtgtgaactcagggatggattcatatcataccagtaggcccagatattttgataccaaggcaaggggttgtcgctgatttctatcttttcttccttagtcacccatttatatctattctgatgtttgacctagggccattccccacctctctgtcctccatgtttcacccagtcatcagcagaacccttcagcagtggctttcactgaatgtgtggtgaggtggatgcttatccttgcatagtccttgagcatcagctatttggttgcagttggttttttctggacctggacataaccttctgtgccgtgttcctgtgtctccagcagccaaagtcctgtggaaagccatttgcagaggattgtgttggggacactgcctctcctccctgtgctataccccatccttgcatccttggtgctcatgaggcctccccaaatccttgagctggccagattcagcactgcacagcaggcccttccctgctgagagctagccctctttatttctgctagcagccccaggcactaattactgggtgtgttagacacatctgtgagagtgctgcctcctcacaccaaagtctacatttacttcttcaacatttatcttctgtcaggttgttggcatggagccgaggctgaggaggctcctgagcagattgcttctgtaggactgctcagttcaaacattcagcaacaccagaagcagcactgtggagagaaacccttaaaaagacaagagggcagggtcccagttttgaggagttgcaaagttcacctatcagagaagtccttgcaaagcagggaggttgggaaggccctcctgatcagctcaggtgttctcaagcaccaggtgactcacacaggagagaagtcacataggagctccaaaagtagggaggcctttcatgctggaaaaaggcattacaaatgcagtgaatgtgggaaagcctttggtcagaaatatttacttgttcagcaccagagactacatgctgggaaaaagacgtatgaatgcagtgaatgtgggaagttatttagagatatgtccaacctttttatacaccaaatagttcacactggagaaaggccttacgggtgtagtaactgtggaaaatcctttagccgtaatgctcacctcattgaacaccagagagttcacactggagaaaagccttttacatgcagtgaatgtggaaaagctttcaggcataattccacacttgttcagcatcacaaaatccacactggagtaaggccttatgagtgcagtgaatgtggaaaattgtttagtttcaactccagcctcatgaaacatcagagaattcacactggagaaagaccttataagtgcagtgaatgtggaaaattctatagccacaagtccaaccttatcaaacattggcgtgttcatactggagaaaggccttacaagtgcagcgactgtgggaaattttttacccaatgctcaagcctcatgcaacatcaaaaagttcacactggagaaaagccttttaagtgcaatgaatgtgggagattctttagagagaattccaccctagttagacatcagagggttcacactggagcaaagccttatgagtgcagggaatgtgggaaattttttagccaaagctcaaccctcatgcaacatcgaaaagttcacattggagaaaagccttttaagtgcaatgaatgtgggagattgtttagagagaattccagccttgttaaacatcagagggttcacactggagcaaagccttatgagtgcagggaatgtgggaagttttttcgccacaactccagtctttttaaacatcgaaggattcacactggagaaatgcagtgattgtgtgaaatcctttagccagcgtttcaacctcattcaacaccagaaagttcacagtggaaaaaatcttgaaggtaacagatggaaatccgttagccacacctccagtctcattcaacactggacagtttacaatgtggacaatgtagtgaatatggaaaaaggtttcagccaaaggcctaaccctattcaacaccagaaagtttacactggagaaaggccttagggtgacaggttatgtactgtctctgaatcaatatgacctcacttaaaacagaaactctgaggatggcctttatgagggagctggcaattgaacatcattcatctaaatatgcacactggaggcaagatgagaattcctgacagattgtccttcctgagaagacagccctctgccttggagctccagagagagggagccctgtattcttggctgtacccgtcgaatggagttttgatctcgctgagtttggagttgggggaggaaaggagtggtcttggttcaaatgtgactcacttttgctgttcttgtgaatgttagatcttctttaataaatatttatttcccatacacccttatgaccatttccagagactgaattgtgtttttataattttcacccttttggctgtgtaacaggtctgcaaagctcctcattcagttattctgtaagttgatccaaatgtttcaaattttaagaacttgccaaattgtgttctaaatggttagcatttcatatttcctcctggaatatattagattttccatttcttcacattactgacagtttatatgtgtagaagtcataggccattcattttagccatgttactaagtgtgaagtagtatttcattgtagttcttaatttgtatttttccgatgactcagttttgagcattttttaatgtgtttacttgtcacccatatatcttctttagtcaaatgtattttttgcctgttttttaaaacatttggttggttacaagttcttaatatttctggagacaaattccttatttgatataagcattgtcaatattttctcatggtccatggcttttgttttcttttcttttttaaaatttagagatgaggtcgtgctatgttgcacagactagtctctaactcctggcctcaagtgatcatcctgcctcagcctcccaaagtgctgggattacaggcatgagccaccatgcttggccttgttttcagttcttaacagtatctttcctagagcagattgtcttaattttatggagcccaatttatccatttgttattttattcattgtgcatttggtgttgcatcctcttactataccatatctttgcctataaataaaagccttgactgagtgcggtggctcacgcctgtaatcccaacactttgggaggccaaggcgggtggatcacgaggtcaggagattgagaccatcctggctaacacagtgaaactccctctcaactaaaaatacaaaaaattagctgggcgtggtggcggctgcctgtagttccagctatcctggaggctgaggcaggagaatggtgtgagcccgggaggcggagcttgcagtgagccgagattgcgccactgcactccagcctggggcacaaagccagactctgtctcaaaaaaaaaaaaaaaaaaaaaaaaaaaaaaaaaaaaaaaaaaaagccttatgtgagtatgctactgtaatcttatgaatctttttaaatatccaacttctgaaatatttgtaggtttaactacaaataaataattcaatatatagataaatgtgtacatattccctatctttactgagagcctagcaagccatggcattccagtagttttgagcacatttaatacccagttattggtttatatcattttttaataaaaggaaccagaactccttagagaagaggctgttttcaagttgtggcagaaaaggtacaacatgatttgaggaaatactgcattggaaaataaataaatgttcacagaataatgttgacatattagctttttattgctatcctgacaaatcaccacaaacttatggtttaaacaacacaaatataacagaagtctcactgggttaaaatcaaagtgttggcatgattatgttcctttctagagtctcagggaggatctgtttcttgcttatttcagttgttagcatatttaagttcttcgtggttgtaggactgagattcctttttcttgatggcatcagctgagggtcattcctaggatatataagaacttttatgaaaaaggaagaagtaataccaattgtatacaaacttccaagaggacaaaggttcaaagaattctggactatatgaaagttagcattaacaggacactaaagcaggcaatgacattaaacaaaactatagaccaataatcacatgaatatagacacagagccttaagaaaattttagcaaattgaggcactcgtccttcaaatcacccccttgggtctcttccaagcatacttgcctttctttcctgttctaaagcctttttaaataaacttgcactcatgctaaaacaaaacaaaaagacatttagcaaattgaatccagccatatacaaacaataataaatcataacctagtgaggtttatcaataatacaagtttgattcaacaattcaaactctttattaatctatattagcagactaaaatgaaaatctcaaaatgtaataaaagcattttacaaaattcaaaactaggttatgatacatgcaacaaattaaacaagatggtgatttcttcaacctgatacagcacatctatgaaaaacagctaacagcacatttgatatatatgtgatcaaatatttgataagctgattttccccaacattaggaataacataaatacgtcaacattcatcacttctcattaaaaaaaaaatctaatgattgtaaaggcagaacccaaactgtctgtatttacatatgacatgataatgttgaaaattcgaaattatctactaaaaagctactagatctaataattgagtttagcaaggtcctaagataaaaaggccagtgtataaaaagtaggtgtctctactaggttggtatatagctagcaaatacatgcttggcaactgaaaaaatgtacttcacaatagcataaaaatatgaaatatttagaaataaatttaacaaaatatgttcaagaactttaaaacattcctgagagacattaaacaaggcataaataaatgacacaagaagttcctgaatctgagacttaatactttgaagttgtcagttttcctttaactatcctaataaaaacctaatcttttaaataaaaatttacaaatgtattctaaaaagttacatggaaatacaaagggcctggactaattgccaaaacaattttataaataagaataagtttgaaaatctttatgactttaggacatacaaacgtacagtaattgagagtacagtattagctaaaggacagagatgaacagaagagaacagagaacccagaaatacactcacacaacactctattgtcaatctcttttcaagaaagttgcaaaagtagtaaaacaacttcagaaaacagtgtagcagctttaaaggtagcataagcttaccatatagtttaggaatcttacctattgggatatccccaagagaacaaaagcatatgttctagaaatacttacacttgcatgctcagcagttttatttataaaacccaaacaccagaatttgtttttaaaacacacacacacaaactaaaatttccgtgaacagaagaatgaataatcaattatggtatatcttaacataaaataccattcaacaacataaaagaataaactatgaatacaagtaaaaatatcatagataaatctgaaaatccctgagccaagtggaagaagccagacacaaaagttgacatacagtatgattccatttatatgaaatgaagaagctgcaaaactagagtaaaagaatgcagatcactggttattgagcctgcggtctgagggggaaggttctgactgaaagagtacaggaaaacgttatcaggcaatggtaattttctctatcatgactgtgttggtggtttcatgacagtacagctgacccttaaataacacaggtttgaaatgcacaggtccaattatatgtgaatgtttttcaataaatatactggaaaaaatttttgaatatttgagacaatttcaaaaaaccagaattcattgaaataggtatgccaagaatgcataacacaaaatatatgtaggttctattttatcattacaaaaccagagcgatattttcttttctttttttttgtttttgagacggattctctccctgtcgcccaggctggagtgcagtggcatgaactccactcactgcaagctccacctcccgggttcatgccattctcccgtctcagcctcccgagtagctgggactacaggcacctgctaccacacccggctaattttttgtattttttagtacagacggggtttcaccgtgttagccaggatagtctcgatctcctgaccttgtgatccacccgccttggcctcccaaagtgctgggattacaggcgtaagccaccacctccctactctttctacccaataaatatgaaggtctgtggaagctcagggcccttcctcactagaagcaagaagccccctgaccccttctttaaaacagatttattttgcctttgttttcatttctgcattcgttccccttcgttcagtcccatagtaactgtgacaggaatatggagcagaaatggatgaaggggagaaattgagggggagttggcttatgggtttgctgcctgttgttgtgcctttacaccaatgttgggtccttgaggaaggaaagaacacaaatgagaatggggtgaaagaggaacgtaaatccttgggctcccctactctctcatcacctacatccagaattcagagccttttcttattatcatacatcaggcattaatattgggtgtccccttgccaaaggaaatttaggaaggtatacgtggctttgcccagtgaaacctctttatggtggccctgaagatcctcttcaagtccttcaaaagaaggaaagattggagtatcagctgcaggaaactgaaatccaggcccatctccaattacaacaggttccagatgagtccgagagttctcgacactcatttctcctccatctcctactccatcatctccatctccatcttctccatcatctccatcttcatcatcatctccatctccatcatctccatgtccatcatcatctctatctccatcatctccatctccatcatctccatctccatcatcatctctatctccatcatcatctctatctccatcatctccatctccatcatctccatcatctccatctccatctcctactccatcatctccatctccatcttctccatcatctccatcttctccatcatctccatcttctccatcatctccatcttcatcatctccatttccatcatctccatctccatcatcatctctatctccatcatctccatctccatcatctccatcatctccatctccatctccatctccatcatctaccgtctccaatctccatctccgaagttatgcccacttcctcgaagtttggagccacgcgaactacactgcccagaaggcgccgcgccgtgagccgcgatgcttggccaatgaaaagaggtctacccgagagtgcgacgcgcaatgggcgggacttccggcgtctcccctcggcggttgctttcgctgccctcaagagaactcagcttgccggaagctggttgttcgctgcggcgaccagctccggaaagcgcggtggggacgcgctgtgttctcgcagctcagaggcgggtctgaggctcggtggcggcgcccagggtggcccgggccctttcctcggtcgttgtctcaccgccacaggctccgatggcggcggccacgctgagggaccccgctcaggtgagcgccgcgtcctcccggcctcccccgaatcctaaagccctgtgagggccgcctgctcaggtccccgggtgcagaactgtggggcgttcgtgggcggcgtcccgtttctgacacgcagtgtgatggggtggcaatggagggcaaggggcccggctcgcaaagatgtgaggcgcattcagcgagtcccgaacctgaggcctcctggtgtctgtagtgggcagcttgggaagggacgaggcgcgtgtcgagcgacagcccgagcagctgcgctttcatcctgagggggccacagtggccgcggagggctggagacagaagagtgacaagatctgtttctcaaagtttgccaaaggcccttcaagtcaaaacagactggggtgggggtgaggcgggtgaagacagacctgtgagtaggtaaattcagtagactagtggagagtctactgggactgggccacagaggaggggaagtgatcagatcttggatggatttcaaaaactgaacagacgggaattcctgttgcatcagatgtgactgtgaaagaaagtagggaatgaagagccattctggatttttatttgtatttttgtttgttcctgaatatcaggaaggatggagatgggtaaggctgtgcagggaataggttttgggcatggtgatcctgagatgtcccagagtggaggtgtcatgtccacatgagcagctggaaggcctggggctcgtatttaggagggagaatcttaaagttttctttcagatggtccctgaggtgagggaagggagagatgggcctgtaggatggggcagcctctacagcctggagtttcgtggtccgaagtgattttgtctggtgcctgcaggaatggagggttatagagtatgaacacccaggactggatggagaccgcagtgttgggtagtatataggtttgccactccaggcttagtagttcctcatgtccagtccatatggagaaaaggaaaggtcagccaggctggtggagcagcacctttggtgcctaagtttccctagctatcagcacaggtgggatgatcaactgctccagtagaagggagggctctcagcaggatggtcttcaggggagtatatagcaggcagccagattgccaaaaggaaacccacattgtctttctttttctttcttttttttttttttttgagacagaattctgctcttgtgatctgcccacctcggcctcccaaagtgttgggattacaggcttgagccactgcacccaggcagaaacccacattttgaaaacctaccagtttatttgcactgaaaatgttgacagaagcattaattatgtgtacagtaagagttgatatttagtcctagacacataagaatgagtttgatacaaacaatagtcctattgagtgaataccattattgccatgttgcagatggcaataccaaggcacagggaagttgagcatttttccaagggcacacaacaggtaagaggcatcactaagaaccaaagcccagattgcagatagtcaggcacacctgactccaggctagacgagggggcttggatgatcctttggtaacatcactgtctggttctcatggtcttgattttccataggttcttgtgacttcagagttagttatagaccatgagaaggtaagtggaggatgtctcaggccctcaccctcctcaactcctacctacatggtcttcagaattatggtgtcttgggactccttgctggctattctccctccccttccatttgagttccctgcaaaatggtcatacagtcagggtcctgagtccagactacatattattatttatttatttatttttgagacggaatttagctcttgttgcccaggctggagtgcaatggtacaatctcggctcaccgcaacctccacctcccaggttcaagcgattctcctgtctgagcttcccaagtagctgggattacaggcacgtgccgtcacgcccggctaattttgtatctttagtagagacggggtttctccatgttggtcaagcaggtctcaaactcccaatctcaggtgatccgcccacctctgcctcccaaagtgctgggattatagacatgagccatcacgcctggcccagattatatgttatatggagaggttctcatttctggcaaccaatgacaggagatttagaaggcatagtgatcaacattagaaaatacgtggaggtaaggttgagctgggaatgcttaggcaaccttagatctccattatgactgggggaagcatcagcaggtataaggcagacctgaagtggttggctgaggagctgggcctctattgtttgtatttttgtttgtttgttttttcctggatatcaggaaggatggaaatggggaaggctacacagggattacggcccaatcttaacaagctttttctgctttgagaacacctgtagggttaaaggtggaggctgggagtccagcaaagaggctactacagtagtctgtgtgagtgctggaccagagtggtggctgtggacgtaggagatgtggttgaagtctgcgttttttttgttttgttttgtttttgtttttttgagatggagtctcgctctgtcgcccaggctggagtgcagtggcatgatctcggctcactgcaagctccgcctcctggttcaagccattctcctgccttagcctcccgagtagctgggactacaggcacctgccaccacgcccagataatttttttgtatttttagtagagatggggtttcaccgtgttagccaggatgatctcgatctcctaacctcatgatccgcccgctttggcctcccaaagtgctgggattacagacatgagccacagcgcctagccagagtctgtgttttttaagtagatatgggcagattttctaaagtgtagggtgggagaaagaggttaatggtaagagtaattttcagtgggaataattaagttaggttttggccatgttgatatgagatgttccagagacccttgagtggattcattgagtgggcacctggacagagaagtctggagttcaggtgaagggttcagattggaaacccacatgatacagttggtgtatggaccaaatggagcagtggagcagatttaggagggagcatcttgaggtcctattggtaatgccattaggtaataagggagaatgtataggggccaagaactgggtctcttgcttggatacctggatgggagtggtgggtttcacaaggacatgagggagaatggtggccatggggaaagggatgtaggggtaaggagggtctgactagtggccaaagttcctgtggggatagacatgagatggacatgaagatgaagctataatgaggtaagatgacaggaaggcaggcactgctgcttattcatccaactgtgggatcacaaggcttttgtttttacctggacctggggagtttctcaggctgctggattagctcaagatcaaatgaggtcatctgagagaattgctgggcctggtttgggagacgtgggctttttttttttttttttaagatggaattttgctcttgttgcctagactagagcgcaatggcaagatcttggctcacggcaacctccacctcccgggttcaagctgttctcctgcctcagcctcccgagtagctgggattacaggcatgcgccaccacccccaggttaattttgtatttcgggtagagacagggtttctccatgttgttcaggctggtctcgaactcctgatctcaggtgatccacctgcctccgcctccaaaagtggcaggattacaggcatgagccaccatgcctgtcctggccttcgattctaatgagagtcagaggaacgctgacattgggcaggaacagcttttcaacacagaaatggaagagtgccacaggtgtccagatatgcgtgcagttccaagtagctgaaggtgaagcaacaaaaagagcccagtagagaggccttcaaagtggggctgagggttgcccctggtagtcagtgccattggaggtctaggaagggatggagttctgattgcatttggtgagtgccctctggatgccatgtgtagactagaatgtggtgacgctaggggaggcacataaggtggtgcagggggcagtggttgtggtacagagtatgtgcacattctaatgagtgtaaacagatgtccccagggaccttgtattgggtgcttcagggagaacactgacacaaatttgattgtatttgggaaacacaatctgggggatccaaggtgagttgtctggcaagagaagagtaggactctgcataccatgcccagagctgagatggactttatctgcctacctgcctctgcttgctcagtgggaacatgaggagagagtgggcatcagtggttctggggcagggtctctcttctgagatggggattaaggaagagggtgagcaggggtggatgtttagggggatgcctaaattccccagtaaggagaccgcagataaactcaactctgtccatcttagcagggctatgtgacctttgaggacgtggctgtctacttctcccaggaggaatggagattgcttgatgacgctcagaggctcctctaccgcaatgtgatgctggagaactttacacttctggcctctctgggtaaggttctcacaccccaccccagcatcctgagctggacttggcttttcctccttttcctagggagaggtctgttcttcccaaagctgaactgtgggcactcattccttctccagtatcctgaagtagctattgtaataggcctgggctgtgtatactaccaccttctctccctgagctgccccacagctgtgcaggaaagggtttgggggtcaggagtcttgcagtcagcttgatggatcttatccctggtggcctctctgtggcctggtgacactgtgcagatctgtggtagttctattcccctacattctgcctgtctcctctagccaacatacctgggtgtcggtctgtgccagcaattgagtcaccaatgtgattgctgtttgactgggttgttcctgcaagaccctcctccaaggttctttctgtactattttgttttctttcctgtggtccatgatgagataagtcattctggctcagtgctgccactcacctgtcgttttccttaggacttgcatcttccaagacccatgaaataacccagctggagtcatgggaggagcccttcatgcctgcttgggaagttgtgacttcagccatactgagaggtacttggtgggtggagctcagggaggtatgaactcgggtatgggtttgtatcataccaggagtctttccagtgggcccagatattttgataccaaggcaaggtgtcgtcgctgatttctatcttttcttcctcagtcacccatttatatctattctgatagttgacccagggccattccccacctctctgtactccatgtttcaccccatcctcagcagcacctttcagcagtggctttcactgaatgtgtggtgaggtggggcgcttattcttgcatagtccttggacaccaactatttcattccagttgttttttttttttttttttgacagagtcttgctctgtcgcctaggctggagggcagtggcgtgatctcggctcactgcaagctccgcctatcaggttgatgccattctcctgcctcagcctcctagtagccaggactacaggcgcccgccaccatgcctggctaattttttgtatttttagtagagactgggtttcaccatgttagcctgaatggtctcgatctcctgacctcgtgatctgcccgccttggcctccgaaagtgctgggattacaggcatgaggcaccgcgcccatcctgcagttgtttttttctggacctggatataaccttctgtgccgtgttcctgtgtctccagcagccaaaaccctgtggaaagccatttgcagaggattgtgttggggactctgcctctcctccttgtgctacaccacatccttgcatccttggtgctcatgaggcctccccaaatctgtgagctagccaggttcagcactgcacagcaggcccttccccaccaagcgctagccccctcattctgcaagcagtcccacacgctaattaccaggtgtgtcagacacgtgtgagagtgctgccttctcacaccaaagactacatttacttcatcaacatttctcttctttcaggtagttggcaaggagccaaggctgaggcagctgctgagcagagtgcttctgtagaagtgcccagttcaaacgttcagcaacaccagaagcagcactgtggagagaaacccttaaaaagacaagagggcagggtcccagttttgaggagttgcagagtccacctatcagagaagtccttgcaaagcagggaagttgggaaggatcttctgaccagctcaggtgttctcaagcaccaggtgactcacacgggagagaagtcacataggagctccaaaagtagggaggcctttcatgctggaaaaaggcattacaaatgcagtgaatgtgggaaagcctttggtcagaaatatttacttgttcagcaccagagactgcacactggggaaaagccttatgaatgcagtgaatgtgggaagttatttagccataagtccaacctttttatacaccaaatagttcacactggagaaaggccttatgggtgtagtgactgtggaaaatcctttagccgtaatgctgacctcattcaacaccagagagttcacactggagaaaagccttttacatgcagtgaatgtggaaaagctttcaggcataattccacacttgttcagcatcacagaatccacactggagtaaggccttatgagtgcagtgaatgtggaaaattgtttagtttcaactccagcctcatgaaacatcagagagttcacactggagaaagaccttataagtgcagtgaatgtggaaaattctatagccacaagtccagccttatcaatcattggcgtgttcacactggagaaaggccttatgagtgcagtgaatgtgggaaattttttagccaaagctcaagcctcatgcaacatcgaaaagttcacactggagaaaaaccttttaagtgcaatgaatgtgggagattctttagtgagaattccagccttgttaaacatcagagggttcacactggagcaaagccttatgagtgcagggaatgtgggaaattttttcgccacagctccagtcttgttaaacatcgaaggattcacactggagaaatacaatgattgtgagaaatcctttagctggtgtttcaacctcattcaacaccagaaagttcacagtgtaaaaaagtcttgaaggttactaatggaaatccattagctatacctccaaactcattcaacactggacagttcacagagtggacaatgtagtgaatatggtaaaaggcctcagccaaaggcctaaccgtattcaacaccagaaagtttagactggagaaaggccttagactgtcgctgaatcaatatgacctgacttaaagcagaaacagccaggcgtggtggctgacacctgttattctcaccactttgggaggctgaagcgggcggatcacaaggtcaggacatcgaaaccatcctggttaacacaatgaaaccacatctctactaaaaatacaaaaatttactgggcatggtggtgggcgcctgtagtcccagctactcaggaggctgaggcagaagaatggcatgaacctaggaggcagagtttgcggtgagctgagatcacgccactgcactccagactgggtgacagagtgagactctgtctaaaaaaaaaaaaaaaaaaaattagcccggcgtggtggcaggcaactgtagtcccagctacttggggggctgaggcaggagatttgcttgaacccgggaggcggaggttgcattgagccgagatcacgccactgcactccagcttgggtgacagagtgagacttcgtctcaaaaaaaaaaaaaaaaaacaaaaaaaacccagaaactctgagggtgatctttatgagggagctggcaattgaacatcattcatccaaatatgcacactggaggcaggatgagaattcctgatagattgttcctcctgagaaaatagccctctgtcttggagctccagagagagggagccctgtattggctgcaccagtcgaatggagttttaatctcactgagtttggagttgggggaggaaaggagtggtctcgattcagatgttactcacttttgctgttcttatgaatgttagatcttctttaataaatatttacttgccataaacccttatgtccgcttccagagactgaattgtgtttttataattttcaccagtttggctgcgtaacaggtcggcaaatctcctcactcagatattctgtaagttgatccaaatgtttcaaattttaagaacttgccaaattgtgttctaaatggttagcatttcatatttcctcctggaatatattagattttccatttcttcatattactgacagtttacatgtatggaagtcataggccattcattttaaccattttactaagtgtgcagtagtatttcattgtagttcttaatttgtatttttcgaatgactcagttttgagcatttttaaatgtgcttattcgtcacacgtatatcttcgttagtcaaatgtcagttggtattttttgcctgtttttttaaaatatttggttgcaagttgttaacatttctgaagacaaattccttatttgatataagcgttggcagtattttttcatggtctgtggcttttgttttctttctaaaaaattagagttgaggtcttggtatgttacatagactagtctctaacccctggcctcaagtgatcatcctgcctcagcctcccaaaatgctgggattacaggcatgagccaccatgcttggccttgttttcagttcttaacagtatctttcctagaggagattgtcctaatttttatgaagcccagtttatccatttgttatcttattccttgtgcatttggtgttctattctcttactataccatatctttgcctataaataaaagccttatgtgagtatgctactgtagtcttaggaatctttttaaatatccaacttctgaaatatttgtaggtttaactacagataaagaatttgatgtatatagataatgtgtacatattccctatcttttgtgagatatcctagcaagcagtggcattccagtagctttgagcatatttaatgcccagttattggcttatataattttttaataaaaggaagcagaactccttagagaagaggctgttttctggttgtggcagaaaaggtacaacatgagtctaggaaatattgcattggaaagtaaagagatgctcacagaataatgttgatgtattagctttctattgctatcctgacaaatcaccacaaacttacggtttaaacaacacaaatatattatcttacagttctttaggtcataagtataacacaggtatcactgggtgaaaatcaaagtgttggcatgattgtgttcctttctagagtctcatggagaatctgtttcttgcttattttgagttgttagcatatttaagttctttgtggttgtaggactgagattcctttttcttgatggcatcagctgagggtcattcctaaaacatgtaagaacttttatgaaatattaaaggaagaagtaataccaattatatacaaactcttccaaaaagagaaaagttcaaacacttctgaactatatgaaagttatcattaacaggacagcaaagaggcaatgacataaaactatagaccaataaccacatgaatatagacagagccttaacaaaattttagcaaattgaggcacttgtccttcaaatcaccccgctgggtctcttccaagtatacttccctttctttcttgttgtaaagcctttttaaataaacttgcactcatgctaaaacaaaacaaaaagacatttagcaaattgaatccagccatatacaaacaataataaatcataacctagtgaggtttatcaagaatagaagttagattcaacaattcaaactctttgttaatctgtattagcagactaaaatgaaaatctcaaaatgtaataaaagcattttacaaaattcaaaactcggttatgatacacacagcaaactagaacaagatggtgatttcttccacctgatacagcacatctatgaaaaacaaacagctaacagcacatttgatatatatgtgatcaaatatttgataagttgattttccccaacattaggaataacataaatatgtcaacatttatcacttctcattaaaaacaaaaagtcttaagattgtaaaggcagaacccaaactctttatttacatataacatgataatattgaaaattctaaattgtctactaaaaagctactagatctaataattgagtttagcaaggtcctaagataaaaaggccagtgtatacaaagtatatatcactattctaagttggtatatagctggcaaatacatgcttggcaactgaaaaaatgtacttcacaatagcataaaaatatgaaatatttagaaataaatttaacaaaatatgttcaagaactataaaaataaaacattcctgagagacattaaggaaggcataaataaatgacacaagaagttcctgaatctgagatttaatatttttaagttgtcagttttcctttaactgttctataggttgagacgatcccaataaaaacctaatcttttaaataaaaatttacaaatgtattctaaaaagttacatggaaatgcaaagggcctggactaattgccaaaacaattttatttattttattttattttatttattttttttttttttgagacggagtttcgctgtcacccaggctagcgtgcagtggcatgatctcagctcactgctgtgtctgccccctgggattcatgccattctcctgcctcagcctcctgcgtagctgggactacaggtacccgccacctctcccggatacttttttgtattttttagtagagacggggtttcaccatgttagccaagatggtctcgatctcctgacctcgtgatctgcccgcctcagcctcccaaagtgctgggattacaggcgtgagccaccatgcccggccaacaattttataaataagaataaatttgaaaacctttatgacttcaagacttatgaatgtacggtaattgagagagtaaagtattagctaaaggacagacatagagatgaacagaagagaatagagaacccggaaatacactcacacaacactctattgtcaatctcttttcaacaaagttgcaaaagtagtaaaacaacttcagaaaacagtgtagcagctttaaaggtagcataaacttaccatatagcttaggaatcttacctatagggatatccccaagagaacaaaaacatgtgtcctagaaatacttacacttgcatgctcagcagttttatttataaaagccaaacactagaagctgtttttcacacacacacacacacatacacacatacacacactcaaaactaaaatgtccatgaacagaagaaggaataatcaattatggtatatccttaaaataccattcaacaacataaaaaataaactatgaatacaagcaaaaacagcatagataaaaaaaagccctgagctgagtggaagaagccagacacaaaagttgacatacagtatgattccatttatatgaaatgaagaagctgcaaaactagagtaaaagaatgcagatcactggttattgggcctgtggtctgagggtgaaggttctgactgaaagagtacaggaaaatgttatcaggcaatggtaattttctctatcatgactgtgttggtggtttcatgacagtacagctgacccttaaataacacaggtttgaaatgtacaggtccaattatatgtgaattttatttcaataaatatattggaaagttttttgaatatttgagacaatttccaaaaaccagaattcattgaaataagtatgtcaagaatgcataatacaaaatatatgtaggtactattttatcatttactaccataaaatatacataaatctattatacaaggttaaaattagtcaagagtcacataaacacagactgtacttggtgcttccagagaaatgtaaacaaacacaagatgcagtattttttttttttttttttttttgagatggagtctctctctgtcaccaggctggagtgcagtggcatgatcttggctcaccgcaacctctgcctcccaagttcaagtgattctcctgtctcagtctcctgagtagctggaactacaggtgtgcaccaccacgctgagctaatttttgtattttttagtagagacagggtttcaccacgttggtctgtgttggaggtcaaaagaattagggtcatgaccaactcagtatgccactggagactatatgagcaaacaacaaactagtctcatgaatgcagtatgttggcaagcctacaactgtgtctgcagccagatggaatgctaagggcagtcacaccccaggtgcagtgttccttgtggttatctacaggaacatctggagtctgttgtataaagaaagcaattatgtgagcctgtgataaatcaagcagctgaccaactgttacgtcttcctctctgtggattctacctaataaatacaaagggctgtagaagctcagggcccttgttccctagaagcaaggagccctctgaccccttctttaaaacagatctttttgtcttcatttctgcatttgtccttcttcattcagtcccgaaccgacagccacaagtggcgcccgaacagggacgtgagtgaagaaggtctgctggagcagagaaagtgaaactgaccagaagaatgagaaaccccaggacaagtctgctggcagtggatataaggtcagtgccctaaagaggtactgggagtgggaagtttctgaatcagggtaacatagggcagaatttgtctgctgaagagcaacattatatgcagtcacttaaaggtttacttaaacaatctggtgctcaggttagttctcaaacactagctaagctgctgcaggaggttatcacgcataacccatggtttccacagacagacactcttgatgtggaaaactggggtgaagatttgcttacggcataggatatgagacttacaaattaaactattggcaatccaggatttaaaatgttaaagaaaatgagatatcagagcagacaaggcttaggaaagtccctacaggaaaaccctgatcctatatcaataactgggcaaacagatagaaaagggctaggtcgtcagatttctgatgtgggtcattgatatttctcctccacccactgctttgccactagagtggctaacaaacctgtatgggtggatcaatggcccctttcacaggagaaactaactcaactccatcagctagtaaaagagcgattggatgcaggacatattgaagagtcagcccctggaattcaccagtatttgtaataccaaaaaagtcaggaaaatggggactgctacatgatttgagagctattaatgcacagattaaaccaatgggtgcattacagcaaggtctgccatccctggcaggcatttccaagagactggcctcttgtagtaatagatcttattgttttttttactatactattacatcagcaggataggcctggatatgccttctctgtgccttctgttaatcaaagggagcctgtctcttgttatcaatggaaagttttgccccaaggcgtgcttaacagtcctacattatatcagaattttgtaggacaggcattaaaggagccttgtaatgtgtttcccactggctatgtcattcattatatggatgatattcttttggccgctcctacagatcaaatcttacatcagttattcagagaaacaaaacaggctttgactaaatggaatctcaaaatagctcctgaaaaggtgcaaaccacctccccataccagtacttaggcactattattactgaaagaagtgttcagcctcagaaagtagtcatctgtagggacagattacaaactttgaatgatttccaacaattatcaggggacattaattggctgcacccaatgctaggtattgctacttattaactcaaacacctttatcagaccctccaaggagattcttcattagactctcctcggcaacttactaaggaggcagaagctgaattatagcttgtagaacagatgcttcagcaacaacatgccacctggttacagccacaaaagcctttgcttctgtttattcttcctacctcccattctccaacaggacttttaggccaattcatacacaaatctgtaatagtattagaatggcttttttatccaatcagacagtgaaatctttgcaaatttatctttctttaattactcaacttataacaataggtaggcatagatcaaaaatgtttatgggatgtgatccagacaaaattattgttcccttggattcccaacaacaggccacagcatgggaaatgtcgactgcatggcaaatcactctcacagattttgtaggaataatagataaccattatccatcagacaaaattttgcaattttatgaagttcacccttttacccttcctgtaatcactcatcacaagcctattccaggcagacagacctattttactgatgactcttctaaaggctgtgcagctatttatggacctaagcatactgaaacaataaagacctctggagtttcagctcaatgctcagaattagtggcagttattcaagttttacagctcaccgctttatctcctattaacattgtctgtgattcagcctatattgtaaatgtagccagtcacattgagactgccactattaaaagcaccctagaaccagagctgtataatttgtttctaagacttcaacaagctgttcactctcatgctgctccttttcatatttctcatatttgctatcacacacaacttcctggaccactatctctaggtaacaataaagcagataaactaatcggttctgtatttcaacaagcccaatcttctcatgcattcctgcatcaaaacacctctgcccttactcgtatgtttcatctgccttgcagccaggcttgagctattgcgcaagcctaccccacttgccagcctgtccctggcgttgcacccatggaaggatgtaacccactaggcttggctccatatgaaatctggcagatggatgttacacatatagcagcctttggcaaactcagctatgttcatgtgactacagacacttactcccatatgctacatgtcacgtgccaaactggggaaacagctggtcatgtctgatgacattgtctgtcaccttttgcccatatgggggtccctacacaatgaaaaactgacaatggacctgcttatgttagtcatgcttttcaaaattttttacagttatgggcaatcactcataaaacagaaattccttacaatcctcaaggacaaggaatcatagagtgggcacatcaaacattacaatgcatgttgaaaaaacaaaaatggggactaggagaccagctaccacctcaaacaaaattacatttagccttatttactttaaattttttgactcctggtatggatattaagactctggcagaatgacattggcaaatgttagagggaaaaaggaaagtttacccaaaggtattacagaaatccccggaagaaggacaatggaaaggcccggtagacttactgatatggggacgagggtttgcttgtgtttttacaggagatggacaatccgtgtgggtgccctcaaggtgtgtgtgaccatggaacgggagactggagaaatccatggatctcaactgtgggcccagctcctccagtacgagccatgagctagttgaatctgaatgcaaagacagaacaaggaccgactggagtcacactgacatcaacccccataaaatggggacagctcaagaaaaccacacaggaagctgagaaactgctggagcaaaacccctgactccatgtttatggccatgctagctgtaatatcctgtgcggtatgttttccctgtgcagaggcaaaaacttattgggcatatattcctaacccaccagtagtacgaccggtactcgggagcaacactcctcctgagatatatcatgatcagggagcatggacaccaggacccctaactccccctgacagagagtgattagattctcagaacaatggtatcaattatactgcaccattggagggacttctttatgtgtcacccaggatgcatcactcaaccgcagttgccttgcaattcagtcccaagcatgcttgagttaccatggaaaaattatgtacctattaggccttagctctattaatattactggtgtagttactaatcactcctggccccatcacccaaattgtattgattgtacagaatgggctccctttgataattctcacccctgtccttggactcagtgtcttggccccttagctaaacaacagtccatgttaatgggagacattatcgactggggtccccatggtcatttagatgggagaagtgagaatcagacctcatggcataaattttgctggcactggtggcgaaacttgaacatctcttcgctacatcccaatctgctacacaacttgcttggcacagaatgggctttagcccacctttgcctcaatggcattatcaaggaaagagaggtccaattcaggagtcaatatggaagacagcactcccatttatgaatggcagcatttgggttgggacactatccaataatagtaataatgctcaatgcagttttaatgttacctttgtagaaaatactaccacacagtttacaatttgtatttttaatccgtatgtttttctagcagcaaaaaaggaccaactccgggtaaacaatgcccaatcgatttgtgatgcctgtcaactgtatcattgccttaatcatagcacaatacaaacacacagcatatccaccctaataattctaggtcacattcctggattatagattcctgtaaatctgtccgagccttgggaggccacccccgctttacattttgtaaaactccttcttattcagcttactcatcgtgctcgtagagctttaggcatgataatttttgctataatttccctagtcacactaataacctctgctgtgttgtcctcagtagcactgcacagctccattcaaacagctcaatgtgtgaaaaattggatgtgcacagccgaccaggaatggatgcttcaaaataaaattaacaccaagatacaaacagaagtggcaatgttaaagactactgttctgtggctaggataacaaatacaaagcctgaagttgcagcagcaattgcattgtcattttaaccctattcatatttgtgtaactaatttggaatataatcaaagtgaatatccaaggaactttgtaaaggcccatttacagggagttttacattcaatgttacttttgatattaatgattcacaaagtaaaatccttaacttgaataagcagactcaagtgcttcagccctctttaaaagcttgggcagaattccagcaaggtttagggagccttaacccttggacctacttcaaacagcacctcaatgtcttttttgtgattatcggaataatgttattatgtttctgttttttgttcatagtctgtaaaatcagctggaccaccaaccggcaattgagagctgcacagcctgcaattacctttattcaattaatacaaaaacagaaaaggggggaggttggaggccgaaagaatgagggtcgtgaccaactcagtataccactggaggctatatgagcaaacagcaaactgttctcatgaatgcaggatgctggcaagctgacaactgcatctgccaccagaaggaatgctgagggcagtcataccccacgtgcagtgttccttgtggttatctataggaacatctggaggctgttgtataaagaaagcaattatgtgagcctgtgataaatcaagcagctgaccaaccattacctcttcctccctgttgattctacctaataaatacaaagggctgtagaagctcagggcccttgttccctagaagaaaggagccgcctgtctccttctttaaaacagatctttttgtctttgtcttcatttctgcatttgttctcttttgttcagtcccaaaccgacagccataggccaggatggtcttgatcttttgacctcatgatctgcccacctcggcctcccaaagtgctgggagccaccacacccagccaaagatgcagtattaagtcataatcgtgcatgtgtgtatgtgtgtgtttgaatagacagagtctccctctgtcgcccaggctggagggcagtgacatgatcatagattgctgcatactcaaactcctgggctcaagtgatccttctgcgtcggcctccccagcagctgagaccacaagcacatgccaccacactggctaattttaaaatgttttctgtacaggctgggcatggtggctcacacctgtaatcccagcattttgggatggttggcaggtcccagaagtttgagaccagcctgggaaatatagtaagaccccatctctacaaaaaaacaaagacaaattagctgggtatggtgccacgcacttgtggttccagctactcggggagctgaagtaggagtatcacctgagcccaggaggttgaggctgcagtgagctgtgattgtgccactgcactccagcctgggtaacagagtaagaccctgtctcaacaattttctgtagaggcaggggtctcgctatgttgcccaggctactctccaactcctggcctcaagcaatcttcccaccttgagctcccaaagtgctgggattacaggcataagccatcatgctgggctgataaaattaactacaggacatactacagtaccataataattttgtagacatctcctgttgttcacagtgttgtgagtattcacttaaagaaccccatgatgttaatcatctccacatgagcagttcatctctccagtaaatcacatattgcagtaaaaagtgatctctcaaggttctaatatattattcatagtgtttagtgcgatattgtaaactttaagtaacgctatatggcctatatgaagtgccagtagtgatgctggaagtgctcccaagaagcagggaaaagtcatgacattataagaagcagctgaactgcttgatatgtactatagattgaggtttgcagctgtagttgcccaccatttcaagataaattaatccagtatgaggatcattgttaaaaacaaacaaaaaaggaaataaagacattgctgcagctatgccagcaggcacaaaaatcttgcattttctgcaaaatatatcttttatctcatttaaaaatgcagctttcatgtgggtgcagaattgccatgggtaaggcatacagagagactcaaatacgatttgagaaacagtcattatatgacaactcaaagcattaggaaggtgaaggatctaaagctggagaatttaatggcagcaagggaaagtttgataattttagaaagatgtttggctttgaaaatgtcaagataataggagaagcaacttctgctgactacaaggcagccaacaatgtcccaggtgccattaagagaaccactgacaagaaattatatcaacctgaacagatttgttttttgttttgttttgtttttgagacagagttttgctcttgttgcccaggctggagtgcaatggcacgatctcagctcactgcaatctccacctcccaggttcaagcgattctcctgcctcagcctcccaaagtagctgggattacaggcacccgccaccatgcccagctaatttttttgtttttttttagtagagatggccatcttggccagggtggtcttgaactcctgacctcaggtgatccacccgcctcagcctctcaaagtgctgggattacaggcatgagccactgcacccggcctgaacaggcttttaatgcaaataaagtgccctgttttgggaaaaactgccacaaaggacatttattagtaagtaagagaagaacataccaagatttaaaacagaaagggataggctaactccagtgttttgttcaaatgtagttggttttatgataaggactgcccttatctataaaactgctaaccccaaacccttgcacaagctgtcagtcttttggttgtacaacaagaaggcctggacaatgagaaccattttttctgggttgttcccattaatgctttgttcctgaagtcaggaagtgccttgacagaaagtaattgcctttaaagttcttttgacattgtacaatgcccctggccagccagaaccccatgagatcaacaccaaagttgtggaagtggtctacttgatcctaaacaccctctaatttggcataaagatgatggagtcataagaatctttaaattaggatccctaatccccacattgttcaagggtcaactgtatatattgaccagtattcattgaactgtacattttaaactggcaaattttattgtgtgtaaattacacttcattaaatctgcttaaagagaaaaaaataatccatgagtccacagacataaatgaatgaatgaatgaagtaggaaagaaaaagttatactttatagtaaaatgtcagttaaaatagatggagatagaaaatcatcaatgagagctaaactggtgaagtaaaagattaatgaggaaaaggagttttatatatttctaaagaatctttcttctggccgggtgcggtggctcacgcctgtaatcccagcactttgggaggccgaggtgagcggatcacgaggtcaggagatggagaccatcctggctaacacggtgaaaccccgtctctactaaaaatacaaaaaattatctgggcgtggtgatgggcgcctgtagtcccagctactcgggaggctgaggcaggagaatggcgtgaacccgggaggcggaacttgcagtgagccgagatcgtgccactgcactccagccagcctgggcgagagagagagactccgtctcaaaaaaaaaaaaattttcttctatttatttgcatttatatagaaaaaacagtagagagaatgtaaacaacccagtcaggaggagactccaacactgaaaaaaattcatgagtaccatatttacatgttttaaaatcatatttcgtcagaattatattttcacaacgatagatatggtaaaaatgattttgcactttcttacagtaccacaaaacattttaatggagcaagagatttctttttttttttttttttttttgagaaggagttttgctcttgttgcccaggttggagcgcaatggccctatctcggctcactgcaacctccacctcaccggttcaggcaattctcctgtctcagcctcccaagtagccgggattataggctcctgccaccatgacaggctaattttttgtattttcagtagagacaggctttcactatgttggccaggctggtcttgaactcctgacctcaggtgatccacccacctcggccccccaaagtgttgggattacagacatgagccaccgcacctggcggagtgagagatttctaaccataactgagattttgcttattcatataacttaatggtttatgttacaagataaataaaaatgattagtatttggttaaaaaattttaggctggacacggcctattatctaagaaattagatatatatcttgcatacaaattcattactagctgtgttatttgtagatattttatgctaatcatttgtagctcctctttttaatgttaacaagatattttgaagagcattgcatttaattatgagaaaatctaatttcttaattttcctgttacagtcttgtttggtgtttttatgtaagaaatatttgcttcactatgatcacaaagattttcctccattatctcctagaagttgtatggtttggccgggcgcagtggctcacgcctataatcccagcactttgggaggccgaggcgggcggatcacgaggttaggagatcaagaccatcctgactaacatggtgaaaccccgtctctactaaaaatacaaaaaatttagccgggggtggtggcgggcgcctgcagtcccagctactcaggaggctgaggcaggagaatggtgtgaacccaggaggcggagcctgcagtgagccgagatcgcgccactgcactccagcctgggcgacagagcaagactcagtctcaaaaaaaaaaaaaagaagttgtatggtttttggttttacatttatgtctatgaattatttcaagttaatttttagcatagaacttgctggaacatgggttaaatggtcaggaaaagtggtaaattaaggataaaaattgctacattctttggaaaatgaaagcaaatagcaagatgatagtgttattcatagagatgaaagtgactgttagacttggtgataaaagctgagaaaactgctcattttggagcacatttaaatatctatcacagaggcaaattggaaggtcagggaaaaaaattggaaaaatgaatctagaactcaggtaacagtaaggatggttgggaaggtttaaattagtaaattggaagatttcatagaaaactcatgaaggttaagtgacctgaggatgcagaagtgaccactgggctaaagtgaagaacaaatatggagagaagtggcaggcttgcatgatacacatgcgttcagtaaagcaaacacatcacaacccagtgagtattctcaatatcagcacatctcttaaactagcaccacaatcaataatgaaaatccccttcattcaccaatgggttctaactcctagaatttatgatttctagtgctctgtattctaacatatattttgctcatctttgcattttgtactcttttgcttaattctcagtggcatatcttcatttggagagatgtcttttaagtctagtggtggcttcttgtcatcctggtcctactcctcctcttcctcgtgttcctcttcctccttctgttctttctcttcctgctccttgtccctttacatctttatctttatttttaccttcatcttcatattctttttcaccagaaatccctcaggttgaccaagatggtggtatgtagctatatgtgccacatgtggcctggagtgtaggactggtaagatgtgactcataacaatatggatagacgatgtaattctgggtttaaaaaaaaaaacctctgcatgacctacacttcagaggcccttagagcttcctcagtaaatttctgttcatttgtgtctctttgggttggtttcctacctggggatgtgacaacatggatcacaggcgttacagtttcaaggtacatttccatagaagaggatgacaaaataattgcctttacatagaaaatgagtcataggaggtttctctttggaattcttaattgtttaccaacagtttccctaaatgcaccaagattccaccctcacatatgtggcactaggctacacgaacttccagctatgacaggaagcatttaagtttctgctgtaaaggaaagaagagattcggggcagaaagcgtcctgactctggggcattactgaactcccctgctgaggaaggaattttggggccaaacagcaacaataagtctatcaagcgtatagcaaaaatattcctgatagtgtcacatgccccacaatatagagatatctaaggataattaatatcaaggtctgaagtgagataattatggtgggcctagaatatgtgaaaacaatgtcacaggaatggcaagaaccaaatgaacagaaataatagagactgataaattatttcaagtcctactctgagtaattactcatgcatcacaacaagaatgattacttcaaactttctgataactatataaacacatgtaaagaaggaagcaatattttccgtattatggattctttgcgtagctttctgaaattcaaaactaaatattgcaagctaactaaaagagatggaatttcttctagaatatcaaccaatacttcaagaaagttgtttaaaaatagcagaaaggtcaatataataaaataagtcaatatcaatattccactaaatcatatttaatgcagatattcatttatattttaaacagtcaatacgtaaagtacctacctgattgttcactttaaagctggtgcaaattaaagtaatatgaaggataataatgctttgcagattactctttaaaaataaatgaaagagatatttagagaatatgtgaacttttagaaaaacacaaataagaaaaaatgtgacaaagtttgaatgaagtaagatttattcattcgtttatgtatatatttacttctgaggcggagtctcgctctgtcgcccaggctggaatgcagtggcacggtctcggctcactgcaagctccgcctcctgggttcacaccattctcctgcctcagcctcctgagtagctgggactacaggagcccgcgaccacgcccggctaaatttttttgcgtttgttttgttttgtttttgtttttgttttttttttgagacggcgtcttgctctgtcgcccaggctggagtgcagtggcacgatttctgctcactgcaagctctgcctcctgggttcatgccattctcctgcctcagcctcccgagtagctgggactacaggcgccaccaccacgcccggctaattttttgtatttttagtagagacggggtttcaccattttggtcaggctgtctcgaactcctgacctcaggtgatccgcctgcctcggcctcccaaagtgctgggattacaggcgtgagccaccacgcccgacccgtaaaactcttaaaataagaggatcatggccgggtgcagcggctcttgcctgtaatcccagcattttgggaggctgaggtgggccgatcacctgaggtcgggagttcgagaccagcctgaccagcatggagaaatcccgtctctactaaaaatacaaaattagctgggcgtggtggcacatgcctgtaatcccagctactagggaggctgaggcaggagaatcgcttgaacctgggaggtggaggttgcagtgagccgagatcgtgccattgcactccagcctgggcaacaagggcgaaactccatctcaaaaaaaaaaaataataaaaaaataaaaggatcagaaataaataatagtggagacaaacgattgtgatgccctaccttgttttaacctgattgtctctctcagctgagagagccaaacagactccatttttgtttcttcacttgcagcccccttatccccctcccttaaggacataactagtgcaagctgactccaagcacatccaggaatgcacttactgatagacactgaggcacgctgtaccagcagctcctaggaacgcactcagttaatggtacccaaagcccctgcgtttatcactttgtgataattaagcccctgcacctggaactgtttattttcctgtaaatgtttgtgtaaccatttatcttttaactttttgcctgttctgcttctgtaaaaattgcttcagctaaactccccctcccctatttagatcaaggtataaaaagaaatctagccccttcttcggggccaagaattttgagctctagctgtctctcggtcgctggcaataaaaggactccagaattagtctcagagtgtggcatttctctataactcgctcggttacaacactatagccaaagattacattcataaagatatttttacaatataggtgtcttatttaatatgactccaatctaaatggtaatttttctaacctttcttaagtaattataaaatgtcaaaattataaacaattaaaaactaaagagaaatgaagacaatggatagcaacaaaagctaattgctaaatatgggggaaaaaagccaggcatggtggctcatgcttgtaatcccagcactttaaggcaggcgaatcacttgaggccggttctagaccagcctggccaacatggtgaaaccctgtctctactaaaaatacaaaaattatccgggggtggtggcgcatgcctgtagtcccggctactcgggaggctgaggcaggagaatcgcttgaacctgggaggtggaggttacagtgagcagagattgcaccactgtactccagtctgggcgacagagtgagactctgtcaaaaaaaaaaaaggaaaaaaagaaaagaaaaagaagatataatgtttctgcaatctcatttcagttccacttatgataatagatacattatgtaatttaagtcactaacacttgagggcaaaaaaacagaataaacacaaacgtgtgggataaggggatgctgaccccactgttagtgatcaccttggttggagacccaggttttatcatacagatgaagcctgcaggtagcaagtttcagagaaatagattgtaaatgtttcttatcagacttaaggtctatgctgatgttattgctgtaggggtagaatgaggcatgtccaaccccttcttccataatggcctgaactagattttcaggttaactctataatgctgagaggagggggtccattcagatagttgggaggcctttgaattttatttttggttatagtttctacattaaaaaaaagaaaaaaattaagggtcgcgtcaattctcaattgtcaacatttttaatgtattgtatgcaatatatgtcaacttttgtgttgagaaatgaagatcaaatcgtattcttttatcctgtgtatgtaataggctttgctgaccctagtttgatgggttttttcctttgtcctctctttcttggattgagtcctcacagcgcggcggactgcggcgtggtaggaactacaccacccagaatactgtgcgccgagcgtgccggggccttagaccaatcattgcccaggaaaggggcacctccgtaagtgcgcaatacgccagaatcttccggcgtctttccggtggtggtcgtttttgctgcctgcgagcgcgtccgcgggctgggcgtttccggctcgctgggtccgggccaggtaactggagccggaaaccggtggaggtggtgtccgcccgcagaggagcttgcctggtctcggtctgagcgtcgcccagcgatttgccaccgcacgcacgccggatcccgggctttaccgcccgcctttccaggccccgccccgcctaaagtcccatggccgaggcagcgctagtgattacgccgcaggtgagagcggagtcctcggatcctcacctgggtcctgaggccccggactggggtcacctgcgtgggtctctgcagttcaggcctcttctccaggacagcgaggagttctgggtggggtcctcagagctgacgggcggtgaggtgaagaagggagagcgttgcgtaccgtgggggctgcacgcgcagagcctgggaggtgcgccggggtcgcgagcattcggaaacttgggggcggacctgtgtctgcagggagcagagagaatgaggagaagaaggcacggctgccatggcagcctgagcaaccggggtttttaattctgagtctttgggagccatggagggttgtgaactaaaggagaacacgatctgagtgagggtctgaaaaaatatttcaaaggcaatgagtggagaaaacagactgttacggagtgatgggggtggacgcagggatactggtgaggagactgctgtagtaggctccaggaggattatggtggattctggaccagacgggttgctgaagggacctaagtaataagaatcttggtagatcttaaaggtaaagccagcaggattttctgctccatcatttgtgcctatgagcaaaagtgggagtgaagtatgatcccaagtttttcttttacctgaacatctggaagagttgacaaagaaatctggtgagggagcaggtttcagggaaatagtaggagttgaattttggacgtggtgtttctaaattgccacagagtgaagttgttacatgggcagttggaatcataagtagaaaattcatgggaggggactgactcagtgatgtgtaaatggagacaggctggggcgtagactcaagccaagccttaaatttagacgggaaatcttaaggttttactttgagatgaagagagggagggctgaggctggaggctgggaaagtgtgggtcggccttggcgaagctgcctgcagataggagggccatggggttccgggggtacttccaaagggaatgtgtaaggaatacacactgcataggatggatttgagggtgggacactgtgtagagtcaccattcagaagacttggcgaactgttcactctatgtggagccagagaaaggtcagccagactagcagagaagcccaagcccagcaagagcagctctcccaggaaaatacaagtttagactgtatagatttaacaaattaaatttatgcaagcaattagttaaccgaataaaatgtcactataactctgtgctctaataaaaaataaatgtttgttttttgtcatgctttcctggcacagaattcctaaaatcgttgtaatttcctcagtgaaaagtgtcttgtgataagtcatggaccgcataacaacagtgttgaccacatcagtgacggtggtcccataagattatgataccatatttttactgtaccttttcattttctttctttctgatcaggaggcaaactgcattttctaagtttataaatgtttaaatgcacaaataattatcactgtgttacagttgctgacagtatttagtatagtaacttgctgtacaggtttgtagcctaggagcaataggctataccatttagtagttgaacaatgaatgtctgaacagtagttcccccttatcctcagaggatacctttcaagaaccccagcggaggcttgaaactgcagatagtacccaacctatatatactatgtttcttcctagactacatacctgtaataaaatccagtttataaatgaggcagtataggagatgaacaataataactggaaataatatagaacagttatactttataagttaataaaagttaagtaactgcagttgagacaataaaaaagcaaaagttaaattataaaaaacatgtgaatgtggtatctctctaaatatcttactgtactattcacccttgtgatgaagaagggactaaactcgatagagtgagatttcctcacactacttacaatggtgcactgttggccagcgcagtggctcacacctgtaatcccagcactttgggaggctgaggcaggcagatcacaaggtcaggagatcgagaccatcctggctaacatggtgaaaccccgtctctactaaaaatacaaaaaattagccaggtgtggtagtgggcgcccgtagtcccagctactccggaggctgaggcaggagaatggtgtgaagctgggaggcagagcttgcagtgagccgagattgcaccactacactccagcctgggcgacagagcgaggctccgtctccaaaaataaataaataaaataaataaataaataaataaataaaggatggtgcactatttaaaacatgaattgtttatttctggaattttaatattactattttcagactgaagttgaaatttaatacttataattttcacactgaagttgagtgtgggtaactgaaactgcaaatagcaaaacagctgataagggaagacttctatacttgagttttatgagatggcttagggtgagcagacaaggtggagtctctagatagcctcagagtggagtcagtcaccagaaaaatcaagtgattatagaatttgaactttgagccccacctctggcatccagggaggggagcagagatctggagattaggttatataaaatcttgaacaatgagttctagaagcttcaaggttgtgaacacttggaagtgctgggagagtgacgtaagagagcgtggaagtactctgccttaccccctctcccagtaccttgccatatgcatcgcttccatttggctgttcctgagttacatccattatcataaactggtaaacataagtaaaatattttcctgagttctgtaagtggttctagcaaattattgaacgtaaggagagaggtcatggcagcccccaaatgtgtagccaagtggagaaaattacagtggtctggacattggcttgcaattgccatatgaagtgagggcagttttgtacgactgagcccttaaacctgttggtttagctgcaactccaggtagttagtgttagaataggattgaattgtaggacacctagttggtatcagaatcagagaatggtgtgggaaaagacactacatatttattatcaaagaagcacagaagcctctcataatttgaaaagataccacattcacataaagacttaaatggcaagtaagaaacaccagagttttaaaaaatgtttacagaaatcttaatgcaatagtcagtactagctaaatcttagcattggacacgtatgaatgagtttgatgcctacgatggcactacgagatagccaccattaagtgtttccattttacagatgaaggcaacctcagagaggttaggtctttgtctagtgtcacacagttggcaagagcaacttaccctttgtaaatgccaccttgaacacctgtatttcatagcctccctcttcctacagattcccatggtaacagaagagtttgtgaaaccatcacaggtaagtggaagaagtcccaggtcttcactggccctgttccctaaagccatgggtctggcccacagatgcaggtaacaataatgtcctgggactctttttccttcatcttgggtccctggggccacctcaggcccaggatgattaatcagggtcaggagttatacagagatgttcccatttctgcatccaataggatgaagtgatgaaaggtttcctgggcataggcgccagcatgtccaaatgcttagagatgagaatgatatgggcatatatagggaactgcaagtctgtgcactgtggccaaaacttttgcagtttgagctgtgacagaactaacatgagtttctttttccttctttacaatctcacagatacatgatttgtccttttcgtagatcttagcaaactcagagtacaatattttttttcttgttaagaactctcaccttttcacttaaaggaagtacttcacaggttgtcttttacatatctgaatggctggtattatcgctcttgtgctttgggggtattaagtaaaataagcgttacttgaacacaagcactgtgataatgagacagttgatatgataaccaagatggccacatagtgattaacaggcaggtagtgtattcatcatggatctattggacaaacggatgattcacgtcttgggcagaacagcgtgggacagtgtaagattttatcacactactcagagaagcacgtcatttataatttttgggttgtttatttctggaattatccatgtaatattttcagaccacagttaaccagtagtaagtgaaaccatggaaaacaaaattgtggctaagatcggggacgactgtatatgtattcagtgctatacattttattctaagcaccgcttcgactgcatctcacaaattctaagttgtgttttcatttcatttagttcaaaatatttttaaatttatcttgagtatttcttctttgttccatgcgttgtcttgtttacatctcccaggtattttgggatttgccagctctctttccattactgctttctagttgaattccattgtgattgcagagcagaccttgtattatttctagtaaatttattaagatgtgttttataactgtgtattgtaaactggggagtaaatgcccttcgtggggtctctaggatcattccaacactgccgtggaaatgaaactctgagaagcataaaggatttattatattcataggtcctcatagagggtggcacagcaaaccatgcatggagccatatggaaatagctctcagggagtggactcaaccaagcaggcagggagccaagagggagagcaaggacctgtgggcaggtgcctttcctactgtgtttgaatgtcattcagtcacagtcaaaggatgaaaagaaggggaggttgtgacagggaccagtcttagcatgctggggacctggtcaccggggtgggttgctcataatgtattggggatgttgaagcatcaggaaaataggaagttttaaagatatataaaacaggcccagaatgtggtctgtcttgttgaatattccgtgtgagcttgagaacagcatgtattctgttcttgttggacaaagtaatctaaagatggtgattatgtccagttgattgatggtgttgttgaattcagttaagtttagtggttttctgcctactgtatctgtcagtaacagaaaagagtgtggaagacttcaattatgatggtggattgatctgtttctccttgaagatctgtcagtttttgcctcatatagtttgatgctctgtggtcaggcatgtatgtgctaaggattcttgtatctttttggaaactgcctcaacctcccgagtggctgggattacaggcgcccgccaccacgcccaactaatttttgtatttttagtagagacagggtttctgcacattggccaggctgatctcgaactcctgacctcaggtgatccacccgccttggcctcccaaagtgcctgtgatgttttcttgatagctacacatgatgagctcagtaaaaggaattgctgtaaataggcctttaataatgtggtggtgaggtgtgtcagcgggcaggggaagcattttaagtcccacagttaggtctcagtgttttagtgagcctgttcctcttgactgaaattcacatgtgtttctaaattgtgtttattatgctttttctctcccattatgtggaagaggaatactagagtgggttgtagttggttatttcccttcccccagatagattaggctctgataatacctctgcaggttaggctctgattaactgttgtctcccaagggcaggctttgtttagaggaacacattgctatggcatattttaaaatgattcattttcccctctctgctggaagcacaaggggatttttttttttccagtattcaccatgagaacttggttaagtttctggaggtaaatattgcaagattgtgggggccccctatcagagtgcctcctgaattttcagctcacagaattgtccacacagaccttccagcaatttatgcattatagattgggttttcctaacctagcactggtttgcatgatggtttcctttcatgagtttctgctcctgtgagccttgattctcctgtatgccctcgtttgtctctccaatcttgtgggcagcagtgtgtgctgtgcccttatctttcctgtgtggatcctagaattgtccatttttcagtctgtttaactctttacttgctattgtgatagagtggccacttccaagctccttacatgcagaatagaaaccaaagtccaggagttaggccttcacaatgtggagtctcatgttgggacttcttggtggtggtgttaggtgcacagcaagagacagacacgtggagttcagggaagggatccaagtgaaagctatccgtcagccagtggctggcctgtggaccatggcagatttaagaggaacactcttcaggtcatagtggcagtcccatcagtgaggaaggatgtagagagtattctctaatgactgggtctcttgcatggtcacctagatagaagtgggaaccatcactaagacagataaagaagagtagtaaccatgggtgtgtgggggtaggatgaaacgggtgtccagctgttggcacagtctttaaatggggaatgttaagagattcattcagaggcaaagcagtaatggaggtcaaataacaccaaggtcagggctggtgcttttcctcccttttgctggctcagacttttgttggtaactcttggtagggcctaagtagtttcagacggtgtgacagattaggttaaaagcaaatgagattgactgggagagtcattcagcctgtggtgggagcagctgggggccaagctttgactgagtataggtggagagaggaaagatatgactggtgtggggacagcacaggcaacactaaggaggaagtggactttggcagcctgagctcacacaaggtctgagtggctgaaattggaacaaagagccaggccacatggggacgtcttcataacagtcctgagactgcctctgacttgggtctaacaaagatgtgaggtggtgctggatccttgttgcatttagcaagcgctgcctggatcccttgagcagagtggcatgtggagaagccaggtgaagtacctgtgtcatggatgctgagggcagtggagttcaaggtgtagcagtcacgatctggagatgtgttcccatgaatggtgtgcaaccggggagggagtatggctgtactcaggatcctcgtactggcactttaaaccaagatggtaagcacaggtttcagtatctgggtctccagggaggtgaactagcaggagcatggatgagattccatgatgtaaggcccagagcccagtgggagacaccataaggacctggtatctcctctgagttggagaactagggaggagcgagatttactggggttcctggggattgagtctgctcatgatttcatctgcccccatcatgcagggccatgtgacctttgaggatattgctgtgtacttctcccaggaggagtggggcctccttgatgaagctcaaaggtgcctgtatcatgatgtgatgctggagaacttttcgcttatggcctcagtaggtaagatctcttaaaaccacaccatcaacctctgctggactctgctcttcccctttttccaggagtttcctgtctttcccagagttggacatgggcccttcttctttccttggttcttgacctgtggaagacataggcgttgtggttgccaggcctgggttttttctgccccaacatctactgtcctgaagccttttagttaagagtttgggttcagactcttgtaacttgcccaaccgacaccacttggttttgccactccttgctaaggtgactgttcagttctgtggtggacctgtgttacaggttctccccctgcctttagtagacgtgtctttggacctgcctttctcaggaattacaggtacttacatggttgctatttgtagggaaccctagactatgacagcaagaccccctcccaagggtttttttgtaataaatttccctcctgtagtctgtcatgggttggcgcaccctgggccagtgttgttgacccacctccctgtttttcccttaggatttcttctaccttccaggacccagatagtctcctgacttaagctggggacaggggagaggcctgtgttcctgaaagcgtagtgaagtcttcagccacagcaaggggggttaacagggtttgggacctgtgagtaggagcagtgggagggcatgatttgagggctgaactcaaatcataccaggcaaatgtcctatgttccccactattttggtgccagggctcatggccatacctcatttttctcttttctctgcctgcttgacaatttgcctacttgtcgtttctactgtgattgtcccctacctctgttctccacatctctcctgttcctgttctgcagtgttctccaacattagcctatacctaatgtatttaatattatgagctgtgcagatacagatgttcctcagctcgtgatggggttatatcctgataaacccattgtaagttgagaatatcgtaagtcagaaatgcatttaatacacccaacttattagacatcctagcttagcaacacagtagagtgtcagttgtttagcctggtgattgcatggcttactgagagctgcagcttgctaccactgcatcacaagagtatacacactgcgtatcactagcctgggaaaagttcaaaattcaaagtatggtttctactgaatgtgtcactttcgtatcatcataaagtggaaaaatcataagttcaaccattataaatcaaagactgtctacttaagctctcaaacatcagctatccagttgtaattgcattttcctggggtgacacacattctatgcaggtctcccctgtctccatcagatgacgtcctattgaaaaccattgacagagaagggagttgtatgccccctgcctctcttcccaccatagtaccccattccttgttctcttgctggttatgggtcttcccctacatggtaaccttaagaggcctaatactgcaagtattatcttccttgacctgactccagctcccttgtcctgaaaacaaacccatggcctgggtgcaatggctcgtgcctataatcctagcacttggggaagctgaggtgggaggatcacttgagctaaggaatttgagaccagcctcgacaacataatgagacctgtatctccacaagaaattctaaaaaaaaattagccaggtatggtggtatatgcctgtagtcctagctacttgggaggctgagatgggagtgtcactggagcttggaaggtcaaggctgcagtgagatatgactgcaactgcactcccatctgggtgacagagcaagaccctatctcaaagaaaaaccatggactcgtccctccctgtgttccacaggtatttgtaatggagctgttcccttctaccaaagtctgcatatacttcacttgcatttttatgcttttaggttgtttgcatggaatagaggctgaggaggccccttctgagcagactctttctgcgcaaggagtgtcacaggccaggactccaaagctaggtccttccatcccaaatgctcattcttgtgagatgtgtatcctggtcatgaaagacattttgtacctcagtgagcatcaggggacacttccctggcagaaaccttatacgtctgtggccagtgggaaatggttttcatttggttctaacctgcaacagcaccagaaccaggacagtggagagaaacacatcagaaaggaggagagcagtgccttgcttctgaatagctgcaaaattcctctgtcagacaatcttttcccatgcaaagatgttgagaaggattttccaaccatcctgggccttctccaacaccagaccacccacagcagacaagagtatgcacatagaagcagggagacctttcaacaaagacgttacaaatgtgagcaagttttcaatgagaaagttcatgttactgagcatcagagagtccacactggagaaaaagcttataagcgtagggaatatgggaaatccttgaactctaaatacttatttgttgaacaccagagaacccataatgcagaaaagccttatgtgtgcaatatatgtgggaaatcattcctccataaacaaacactcgttgggcaccagcagagaattcacactagagaaaggtcttatgtgtgcatcgaatgtgggaaatccttgagctccaaatactcacttgtggaacaccagagaacccataatggagaaaagccttatgtgtgcaatgtatgtgggaaatcattccgccacaaacaaacatttgttggccatcagcagagaatccacactggagagaggccttatgtgtgtatggaatgtgggaaatcttttattcattcctatgaccgcattcgacaccagagagttcacactggagaaggggcttatcagtgcagtgaatgtgggaaatccttcatatacaaacagtcacttcttgatcaccatagaatccacacgggagaaaggccttatgagtgcaaagaatgtgggaaggccttcattcacaaaaaaagacttcttgagcaccagagaattcatactggagaaaagccttatgtgtgcatcatatgtgggaaatcatttatccgctcgtctgactacatgcgacaccagagaattcacactggagaaagggcttatgaatgcagtgactgtgggaaagccttcatctccaaacaaacacttcttaagcatcacaaaatccacactagagaaaggccttatgaatgcagtgaatgtggaaaaggcttctaccttgaggttaaacttcttcagcaccaaagaatccatactagagaacaactttgtgagtgcaatgaatgtggaaaagtcttcagccaccaaaaaagacttcttgagcaccagaaagttcacactggcgaaaagccctgtgagtgcagtgaatgtgggaaatgctttagacaccgcaccagcctcattcaacaccagaaagttcacagtggagagaggccttataactgcactgcatgtgagaaggcctttatctataaaaacaaacttgttgagcatcagcgaatccacaccggagaaaagccgtatgaatgtggtaaatgtgggaaagccttcaacaaaagatattcccttgtcaggcaccagaaggtacatataacagaagagccctagcaattgttgggatgtgtaattgtcttattcactgtaggacaccagagagctgatttttcaagggatccaacagacagaaattcaccctcatacatctgcatatcactagttgaaagattcactacaaggtccaagtacttgggaagctttctagagattacttgtactttctaatctgcccagtgttacaacagacactaccatgtggcatatcctcaccgttttcatcagtcactcacatgtgctcaaggaatgcagaccactgtgcttaccaaattctgaagggaataatataataaaagcctgttgagggtcctcttccatcttgctgaactgttcgaggcaaagacaaaacccaactttgaccaagaagagcaatctggattcttgtagcccatggaggtttaccttcttcataggttttttttttttttatgtgattgccatagtgggatattccctctcccacattacccaagagggaaatgggctgtcttaccatgtgctgatgtatgtgctctgccagtgtgaagggtgaacagctccaactttatgtccccccagggacatagtatgagatcggaaaatagttcttagtcctgtttgtcttaatttttattggtttccaaggtctcctaggaaggagagcagagctgtgtggtcctaatcatggtgtcgatgccagatttatttgtaggtccagaggtctccctgagaagaggcatttgtgacaaactcaagtgctgggacctgcatgaattgtttatttgcagtgatgcttcatatttcccagcactgttcatggtatcttatttcccaggtccttcattgtagccatgggcactgaaggactgaattggtaggtaggtcactggttgtaagacctactggggccaggtaagaacagtaattggcccagacaggtaggtgtgataaacagagtagaaaagattgtggccaagaagagtgaatgtgtcccatccaaaggtgcatccagatatgtctgtgttactatggcttcatggtttgggggtatatagaaattctcaggacctcagacctttgattctcctttagcaacacacatcgtcagcataaggcatctaaagattttgtggactcataacttatgtactgtttttgagatgattgctgcacgggcaggaaagcaggatttgagagaacatacaccttgccttccagatatgtggtttttgtgattcacccagatctgttgtgccagttaggaattatctttattacttcccgtttattgccactgctgagaaggctgtccttcctaacttgtgaggagatgaatccttaataataagtaaatcttgtgttatcctatagtctggttttccaaaaggagaggtagatgcatatttttgtgtggaaccatttatcttaaaacattgaggtgcagttttcatacacaaaaccttctatctttttaagaactgtctgtatggtttattgcccagttaatgggttttgatagtcatgttatctcagtaagtgtcttgtcttagaaatatgtgtgtataggctgggtgcggtggctcatgcctgtaatcccagcactttgggaggccaaggcaggtggatcacctgaggtcaggagtttgagaccagcctgaccaacatggtgaaatccagtctctacttaaaatacaaaaattagccaggcgtggtggcgtgcatttgtaatcccagctacacaggaggctgaggcaggagaattgcttgaacctggggggcggaggttgcaatgagccaaggtcgcgccattgcactccagcctgggcgacagagtgacacttctcaaaaaacaaaaacaaaaacaaaaagaacagataagaaatacgtgtgtatatattctattttgtgtgttttcattcaccttatttcattcagtcttccaaatgaaatgttcttaattttgatgaagtctaatttgtctgtttgttcatttactgttattttggtgctattaaaaaaattttattccttggctgggcacggtggctcacgcccataatcccagcactttgggaagccaaggtgggccggatcacctgaggtcaggagtttgagaccagcctggccaacatggcaaaaccccattctactaaaaatacaaaaattagctgggcatggtggtgggcgcctgtagtcctagctagctacttgggaggcctaggtgggaggactgcttgaacccaggaggcggaggctgcagtgagccaagattgcgccactacactccagcctgggcgacagagcaggactcccatctcgaaaaaaaaaaattgtgtaattataggaactttggaaagattgttattcaactgatattacataaggtatttattttgtaaattatttgcaatattagaatttctgtcagcctacagtatttctctgctgttattctgaccttaacacattgaaagagttcttaattttgcttcgccatcccttacgcatacttaatttttgttattttgccaaattccaattatctttacaagatcattttattttttaaaagagctaaccagacaagaaaatttgcccttgttattcccacttcctatatagcttgtctgccaaaacctttatgccattattctcatcagtctcattctcaggggtttctctgagcaaatccatataaaagtggaactatatgacatttcctgccccgttctcatgcttcatctttaataggtaaatttaccattttaaatagttttaaaattatcttcactgtgtgtactttggatttaatccttactaatgattaagatgctctaagaatcaatgtaaaactaattttaaagccagcagcataattttgtgagttatgcctgagtattcaaaaatcctaacaagtcaaaaatattaattaaaatcaatatgtttaatctttccaattaaatacttccattccataaacttcagaaccaaagttagataccaacaagagactgaagataaatacagtgtcaatagtatcaagggactagcccatataatatacttgaaaatcgtattaatcaccaataaagtaccccaccataaacaaaatacacaataaaaagtcaagatacaaataaagacaggccaacatatgagtagaccattgacagaagaggaaaaacaaaaggcaatgaaaggatatgaactaatgttcaaatgtatttcaatatgagaaataccagatatattctatatcactttaaacttctaaagtaaaaactggaaagctgggtaattctaaatattgtctgggacacagtgatacagaaacacttttgtccatcttatgggagaggaagggcaatgtataacataattccagttacatactagatcaccatatgacctagccattcagctgcaaggtacatttctcatgtatggccataagtttatttagaacataatactgatgaccttatttttaaggttgaatcaagctggtggtgatatatttcatagcaggaaaatggaggaaatacatgtccataatcagaggatttgaatcaaggatgaaagcttcatgatgtaaaatattacatggcagttaaaaacaattggctagaggtaagcccatgaaatataggatagaaatataatattttgctgtagtttgagtgaaaaagaaaaaaaaagaattgtgaggtctacaataaaacataatttaaaaataatttaataccacaaaaactccaaagaaaaaaaaccaaaacaacccagacacttcttactagaacatatgttccatgcttctatctcggcttctggtagccccgtgtgttccttggcttgaagatgttcttcctgtgtcttcacatcgtcttccctctgtacatctgcctctgtgaccaaatttcccatttttctaaggacacagtcatagtcaattaggaactaacctaatggattaactaacatgattacctgaggttctgagggtaacgactccaacatcttttttggagacacaaacacttaacattgccctatgaatttctgcagttcttcaaagggcagagtgaataataaccacagcaatttcaagacacacaggcttccattgtgagatggcttgtttaaagaaactattaattccctacactcttctgatcactctgttgttcacattcattttaggatttctcttccaaatcacttctggtgctttccttcttgcttctttcatttccttcggtgttgtagttctattatgtttttattccgtcagcaatttcttaaatttctcttttcaaccttaagcagtttttctgaaattataaaatttactgtgaacatttcaaacatttccacatgtgcatgaagttaaagtgaactctgacattcccctctaccccatcccttccctccctctacacccaaggagcaaataccatttaactgggtgaggatccttccagacacattttttgtctgcttacaaatattaagatttctaattcgtctttgcatgaccgacttgccgagttaatttaccgtccacatttcctctgtgacatttactgattgaagtgcaccaactgtgaatggtcataactagtcccacccccacaatcatttctcacagattaagcagcataagagcatagtgctttttatctaatttgttcattaaatgtaacaaagttacaaaaacatgaacatgaaaacgttttacctctgccgggcacggtggctcacgcctgtaatcgcagcactttgggaggcagaggcgggtggactacatgaggtcaagagttcaagaccagcctggccaacatggtgaaaccccgtctctactaaaaatacaaaaaaactagccgggcatggtggtgggcgcctgtaatcccagctactcgggaggctgaggcaggagaatcccttgaactcgggaggcagaagttgcagtgagctgagatggcgccactgcactccagcctgggcaacaagagtgaaactctgtctcaaaaacaaaacaaaaaacatgttttacctcaatcataaactgtggaaaacatacagaagttcacaacttttactgtaagttcaaaacttctactgacttaaaaacgggtgctaaacaagtttaagtcaatatattgcacctgttctcatgtgtttttcctatattagacagtaagttccttccctgctcaagggcaggacccatagcccagccatccactgcatcccactcttctaagtatgaccacaacagtgagtggccatggagctaaatgacaggtgtctcatgagattcttgcctatcacagcagcaagttcatagtagatccttgtaccaaacacttcagtgaagactgtatggaaagagctggaagctaagaaaaacctagggtgtcctttatcccatggaaaacactcctgctttgggacaaactggggcctaggtcctcaggcctggaaagaaccctttgatgacagccaatatgtttctagaggggtttctccaactctcttgaacccagggccttaggtacaagtacagccacagctacaatacatgcagccttccagagagaggatgcaggagggtgggggtcctcaagagtcaactctccttcccacaggagaggaaactgtgcactctgtcctgaaaaaacaaaaacagagaactcttaactcaccaagaattctatttataatatgtgcaaaaggaccacagtaaaaggtacatgcccactatgaaaacatgaatatatatgcagtgctttaaaaggttgtgaggaaagctcaaagtgagaaaatgataattttctatttttcacacgttttaacctaacattatctcatgtagcttgaaaactaaaagaaaatctcacaaaaggaatttcaaattaccagattcaggctaagtacagtggctcacacctgtaatcccagctttttggcaggctgaggtgggtggatcacctgaggtcaggagttcgagaccagcctgggcaacatggcaaaaccctgtctctactaaaaatacaaaaattagctgggcatggtagtacatgcctgtaatcccagcttcttgggaggctgaggcaggagaatcgcttgaacccgggaggcagaggttgcaatgagccaagatcgcactcctgcactccagcctaggcagcggagtgagactccatctcaaaacacaacaaaactaattaccatattcagtgctagcaccaagggactaaggtcatggtggttaactatgaaactcacgtaaacctgcccacgtatatcctgattcacctgttaaaatgctaggcactttattttgtagcaaaacttcacgcaaatgtttataagatcagacaatgagattcctctccatgttgttttcttgggtttactgggtttaccatggattcatcttagttgtgtgttttattttgcctgttttagctataattcaatccctagaaaaatgctgagggggacctaaaaatacccctctacacaggattaaagaatctgataaacaccagaaagaattaggactcatctgagaaggccaagcaagtacaaagtgatcactatgttgccagagaaaataaagacaacaaacagacagaatggaatcaggaaaatgtgagagtgctgagcatttgaaaccatattaggctaggtgtggtggctcacacctgtaatcccaacactttaggaggctaagcaggatgatgacttgagtctagcagtttgagacaaatctggggaacacagcaagacctcatctatacaaaaaaatttaaggctgggtgcagtgactcacacctgtaatcccagaactttgggaggccaaggcaggtggaccacttgaagccaggagttccagaccagcccagccaacatggtaaaaccttgtctctactaaaattacaaacattagccaggcgtagtggtgtatgcctgtatcccaagctactcagaaacttgaggcaagaggaccatttgagcccaggagttcgaggttacagggaactatgatcatgccactgcactctagcctgggtgacagagcaagtccctgtctcttaaaaaataatgagtttattaataaaaatcaaagccttaaacagtcttaggtattgcacattttaatgtggtgcacattttaatgtggccatctgtacatgggttcttctcaccctagatataaaaaagaagtgtcacatgaagatgttctcagtattctaatttctactaaattcaagaatctcatgacacaagccttcatatttctcacaaagaattactctcctcatggatatcctcccagagatgtctggatcaaaggcaacttccaagaaatgcctgaagagctgccctcactgtctaactctgacaaaggatggcagtgaatgtatgttaaaaaaaaaaaaaaggaataaaacccctttacctctcaaacattcccctaccaaaaaataaaactgatcttacagggaagtctgtaaggacataaagcaagaagatacctgtaactgaaggttttcataagttcatagagaaaatcccaaggtgggtcaaattccagcatggctctttataggacaagcaagtgacaacctggtcacaaagttttctcacatcaataacaattatgtagtaacttttcattatgattctcagatagtaagatttctgctctggccaaagactgtccttaatagttatatttggaatgtctttctccagcatgagttctctgatgttgatggaatgccttccacatttccccctggtatgaatccttctgcaatgagtgagaactgagtggtgactgaagggatccttacattcactgtattcacagggcttctctccaaagtgactgctcatgtgttagttaagaaagagctgacaaaaaaaatgaaaagtttcctgacattctttgcattcgaaggacttcttcctacagtgtgggtcccattatgaatgataaaataacagtgggtaaaggccttgctgtattcattgcagcaatagggttctctcatgtatggaccctttggtgctgcagaaggtgtgacctgcgtttgaaggccttcccacactcgatacacttgtagggcatctccccagtgtggatgacagagtgctgaatgaggtacgtgctccggtgaaaggctttcccacactgggtgcattcatagggcttctccccagtgtgaatccgctggtgctgtatgagttctgagctgcatctgaaggcctttccacatgccatgcaatcatagggcttctctccagtgtggatgatgtaatgttgaattaggtgggctctattgctaaaggctttctcacattctttgcactcaaagggcttttctccagtgtgggtcctattatggcgaataaaagtagaccggtgggtgaaggcctttcgacattgactacactcatagggtttctctccagtgtggattggatggtgctgcatgaggtacgacctgcgtttgaaggccttcccacactcaaggcacttgtatggtttctccccggtgtggatgaggtagtgccgaatgagagttgagctctggctaaaggctttcccacatgcattgcattcatagggtttcattccagtgtgaaccctctgatgtcgaacgagataccacttcctgttaaaacctttcccacactgcttgcatttgtaggggtttgtccctgcatgaatcaaggcgtctttccctggttgctgtgagtcacattcatggagaacatctgctgataaccactcttgtaatgccctggagtgcagaccatcatctgtccccaaaccttcaccttcaaggctcactttcccaagatgggtctccttgtggaggtctgtctccggtgtcactttacctttctgcatttccaaaagcccttcctcatccctagctctccccaacctcgaatcacttgaggttgaagattccagagtcaggcttccccggagaaaggcccgctcagataagactggcgggtaagtggttggctctctggtatgaacttgtgctctgtcacctgaagggcatcaacaaacaaaggaggggtcttttagtgataaaatatagaaaaacacaaaataaccacttcagtaggaaaatgaagatgaaaatagtgcctatgatacttgctgcatttttacatctctaacccaggttaccaaatactgcttacggtccttgtatccttgacaccattaaagggaaaatctggagggcaggctggaccgggggacagaggatccggagtaaagacatttctctttacagttcagagtaaggaagagataatagagttttgatgacattgtctgaagggcatttgctttaagaattgaacgcttacatccatctgacaagggattaataaccagaatatataaggagcttaaaccactctataggaaaaaatctaagaatctgatttaaaaatgggcaaaagatctgaatagacacttctcaaaagaatacatacaaatggccaacaggtatatgaaaaactgctcaatataattgaccatcaaagaaatgcaaatcaaaactacaataaggtatcatctcatcctagtcaaaatggcttttgtccaaaagacaggcaataacaaatggtggcaaggatgtggaaaaaagggaaccctcatacactgttggtgggaatttcaattagtacaactgccatggagaacaatctggaggttcctcaaaaaactaaaaatagagccaccatatgatccagcaatcccagtggaggtatatacccaaaagaaaaaaaacatcagtacatcaaagagatatctgcactaccatgtttactgcagtactaggcacaatagccaagatttggaaacaatttaagggtccatcaacaatgaatggacaaagaaaatgtggtgtgtatacacaatggggtactatttggccataaaaaaggagatcctatcatttgcaacaacagggatggaactaaaaatcaaaacaactgaactcatggagagagagtagtaagatggttactggaaactgggaacggcagtaggatggagtaggatcctactccatggagtagtgaggatggttaatgggtaccaaaatgaagttagaaaagaatgaataagacctagtatttgatagcacaaccgggtggctatagtcaaaaataatttattctatactttgaaataactaagggtataacgggattgtttgtaacacaaagaaaggataaatgcttgaggtgacagatacttcctttaccttgatgtgattattatgcattgtatgcctatattaaaatatcttatgtacccacataaattaaaaattagccaggcgtggtggtgcatgcctgtaatcccagctactcgggaggctgaggcaggagaatcgcttgaacccgggaggcagaggttgcagtgagccgagattgcaccattgcactctagcctgggcaacaagagcaaaactctgtctcaaagaagaaaaagaaaaataaaaataaatgaagccttttggtgctataagagtttagggaagttgcacctaatgagactggaaagaaaaagagatcatggaaggctttctagaggaggtgtcccataagctgagtcctaaaagagaagccagagtcattgccagagagaggaagtgggcaatgggttgaaggtgaggaagtaaaaatgggtagattcaccctttgggcaccagatgcctggtgaaaccaatataaaagggtgattagagttggagcaagaaaatgaagattccagcacaaaagggatggaagtacacacaggaacaaatggtacaaaaggcctagtgtagtaagatctgacaagtttctgctgtgtcaggaggcacaatgcatggcagacaagagggtactggagacagaatgactcagttcaaatcctgcctgtgtcaagtgggttgatactggaggatgactttctccaccaggtctccaattcctcaactaagagactaggagactcaatttctcaggctgtcatgaggttaaatgagaaaatgcacagttcttgatgcagcgcaagtgttcattaaattgtgggacattacccttattattttcattgctgcgctgggcaatttgggtaatgccagtgacactagcaagaacaacttcagtgctgtgatctgaggaagctagcagctgtgcttcatgaagtggccagcatcgcatgcttagaagacccgagtgcagcagcagtctcatacctggaatggtggggatgggaaatggtgcggctactctggaaaaatatttgggggtttgacttaaaactgagcacagatctgtctcttgactccaccagtcatctcctgggtgtatatgcaacagaaatgagtgtttatatccactaaatattatggaaaatagtattcatagcagcattcttcataatctccaaacaaggtaaacaatacaaatgtcaaccaataggagagtgaagaaacagatcctgatgttttcacataattttatggtacacagcatataggataaacccagctcatggacacaatgatggtgaaaagaagaaatacacaaaagagaaactgctttggggctccaattatgcccattcacaaccaattaaaaactagtccctagggagagagtctaaacagtggctcccactgcaggaggagctattgacaaagacagggtaacagaaactgccgaggtgctggaaatattgtaaatcttgacctagatgaagaattcaatttgcagaaatgcaaaaatttaagctgagcccttcaaatttgtacttattattgtatacataagattttttttagtttgagaaattttaaacaaaaaaatattaaagtcaagtgtaaacatctcttccaaacatgagacaactccaagaagcttggctttacaagtggggtcaacacaagttacagggtattgtaggtgaaaaagcattttgtctgttttcgccaagtgtaagcaatttgagtacacttttttttgtttgtttaaacttatattcactttctggttttgtattgtgcacactttttatttgaatatagataagttgaaggtacagacaaagcagagattttttttaaaaaaagcaagttccctgagaacacagcaggtatgatgcaggcactggcaaagacactgaccatgactagaggtaagatctcctccatagaggacaagagaagccaagtatgagaccgtgcagatgaatctttaagaacattaaatacacatcctatttttaacatgaaattaattatatactgaaacatcagctgctggggaagtggtgaaaatctgaaacacatctgagtggctgcaggagccggtgcagggacaagagctgcccagaggaatggggcagatgtggggagacctgtcaggagcctctggtatggcccaggcagaagattatgagagcccggactagggtgttggtgaaggagccaagggaagcagtggaagtgatggacttaggagatatggatcatttaaaatgagcaggactagggatgaatggatgctgggtttgatgaaggtaggtggagtccaggagctatgtggtgtgtttccagccttctaacctgcttggatggtaagacattctctgaactgagtgtctttttaggcatcaggagctaaaggtgcctctgagacacttaagtggagatgtgggattgagggaatgggaagggaggtatttggaacacagggttgcagatggggctggccaagaagcccaaggggagagcccatgactcagtggtgatacaaatccacaaggcaaatggctccagctacactcatcagcacagatgtagggcagagaaggccaaatgtcaccttggtgtttctcagggcaagaggggcaggaagatatggagcaaagggctgcttccgagtctctgatggtctaactggaggatggatgagtggacggagagggtggaaaagagtgggattcacagcataatgcagacagtaatatcaaggggaggaaagtcccctttctcttgagtccagaaagaaatgtatgacattacatttatgatgattaaaactgttcatgcataatactaactagctgacatttgttgatcctatggaccaggaactgaactaagcagtgtcatgtgttatctctacatcctctaacaactcaatgacacagaaattatatcactctgattttgttgagtagaggagtctgaggtgatgtaaaccaaacccattaattcttttccatgggcacatagccaaatcacatttgtcagtcctgagcatctaggtgtggccaaatgcctagttcttgtcaagactatgtggttgtcaagtatgtgtacaactgggtatgacttctccccttcttcttgttccccttctaccagctggattgagccagagcaaccataaagattcctgttcacagcaaaaggtacctgtgtctctgaataattgtgtggctcagtgctcacctgatgatggacactatgacccaaagtgagtcagaaacaaccaggcccccggaaagccacaatgagcagtttcacacagaaattcagaggcagtggtgccctcacattatctgaagactgccatgactccacatgaccagctggtggctgcttacctgcacaggtagcatgtgagaggcctctcttcactatccacagctcctgcccatgctctagcaggtggaccaactctggtttgggaacccgatgccctgttgatagcaaaagaaatagaataggggtaatttaatgagaaaatgaaagtctctccatcttgcctaggacttcatgacagggtccagacatgaatgcagctgctcccaaagtaagcaaaatgctgatgtgagccctgaaaatcaagggcattgctctgagtgagctgtgttccccataaaaatcatatgttgatgccctaacacccaacgtgactgtatatggagacaggatctttagaaggtaattaaaattaaatgaggccacaagggtggagccttaatctgataaaattatggcctcataaaaacagagagagatctctcctctgtccctccaccttgtaagaacacagcaagtcagccatctgcaagccaggaagagaggtctcaataggaatcaaatttgccgacaccttgatcttggacttctcagcctccagaagcataagaaaataaactctcgttgtttaaaccacccaatccatgacattttattatggcagccaaggagataaaagacaggcacaaatcccactgttgggctacaactgccatggagggtagtgctatctgtctacacaacacccactgcccatgacctccgtctatggaagccaacgttgttcaggcacacaacactttgacagccatgggacacggcaaaggtgtgctgcttcctccagaaggcattttctttctttctttctttctttttttgaaacagagtctcactctgttgcccaggctggagtgcagtgctcggctcactgcaacctctgcctcccaggttcaagggattctcgtgcctcagccacccgagtagcagggattacaggcatgcaaaaccatgcctggctagtttttgtatttttaatagagactgggattcacaatattggtcaggctggtctcgagtgcctggcctcaagtgatcctcctgcctcagtctcccaaggtgctactgcacccggccccaggaggcattttctaacaaatctaaatcattgcttctcaaacacctcgtgctttcagaaccacttggggatgcgtgattccaacctcaaaccaaatgaaacaaaatttcttcgtgtgagacctgggcatcagtacttccaaaatgtgccccccaaaattctggtgcccagatggggctgcaaaccactggctgaggctggacatggtggctcatgctgtaatcccagcactataggaggccgaggcaggaggatcacttgaggccaggagttctaaaccagcctggccaacatggtgaaaccccgtctctaccaaaaatataaaaaattagccaggtatggtggtgtgcacctatggtcctagctactcaaggggatgaggttgggaggattgcttgagcctaggaagcagaggctgcagtgagctgagatcatggcactgcacttcagcctgaatgacagagcaagactccatctcaaaaaaaaaggaaaagaaaaaccagtggttgaaataaattggtaatgcaagagtcttcattaggcaggtgaccaaagctggattctcattgtgaaaagaaagcatttattccaaggtgggaggatggattgaacatgggggcctgctgccccagtcaaggctgcagcacccagcatccctatgaggagccagcctgaggacaatcagaagcctgaaccaagaagaaggaacagagaaccaagacatccttgatggcgtcactgggctgcggcaccgaacaagcctggagccaaccacacctcaggcttctcatcaggcgagttagtgaatttccttccaggtgaagccagtttgatctggttttctgttatatgcagccaaatgctttccactagatgtggtgagtaaaagacaggaggattctgtatagaagaccaatgactgaggtacaaggatccacagaaacatcgactggcagattctgaaccatagcccaggattccttcagacatgtcacagtaaggtccaccaatgtgtgctacatgcctggctttgagttctgggacagggctgtgggaaaggtgaatcagatgatcctttggctctcccaagagctgagctccctgtcacttttcacacgctggttcctccacctggaacactgttaccctcttccacctccttctatccagctaactcctactcagctttcaggtctcagctccactgtcacttcctgagatgccctctttggaactcccacaataggttatgacatcctgcttatttattcctaaattcccctcatttttctttctagaacttatttcagttgtcatctatggattgatgtccaccttcccaactgaactcagagtgtgccatcaattctaataacttctttatcctgacccacttttgttaaatattgtattctaaaagggaaccttgttttgctctggtaagtgagaaagtcaatttcccttcctacaaatagaagtctgcaatcacaacacaacaaaatcaaaacaatgccactaagtcccaggaaacccttgtatgtttcttagggctaagttggaggttgtcccctctgttaaaaaaaagaaatgaactgcactgggggagtgaaaggaaaatgaaagactcagcgctgatctgagacttttctttttttttgagccggagtcttgctcagtcacccaggctagaatgcactggcgcaatgttggctcactgcaacctccgcctcccaggttcaagcgattctcctgcttcaaactcctgagtagctgggattacaggcgcgcaccactgcgcccagctaatttttgtatttttagtacagacggggtttcaccatcttggccaggttggtattgaactcctgacctcgtgatccacccgcctcggcctcccaaagtgctgggattacaggcgtgagccaccacacccagctgatgagacttttatgacaagaattagcgtgctggacagagaaagtaaaaggaatggctttatcagggtatcaaaccatgccatttgaggacattcctgtgtaccctctaaaaacacctcctggatcaacagagcatggatatcaagcatcagaaaacaactaatgaccatgcaggcacccagatgcctttttacagagattgtattgcttaggaagatatccgaggggcactgaggacaaatgtcttctggggggctgcctgactcacccctttctctaagaacagcccatcacccatggcccctgcttaatagggctgtggccacagctgaccccaccaggatggccaatcagcttccttcttatgcaatcttgattaaggacctcagaatgggctgagcactggagtgagggtttgtgttaaaaggacattttctaccccgacaatctctgatgcagacaaagggagaccagtcaggaagaggtgggaacagaaaggtctgtcaagagaaaggtgggcagttccagtgacctttttgcctggccaagaatcagggttagggtcctcctcagggatgagaggtgagtcattacctagtgaaaccagaagcccacaggtctccagcatcacctctcggtacagggtcctctgggccaggtccagctgtctccactcctcccgggtaaaggtcacagccacatccttgaaggtcaccaacatctggaaagtcaaacagaagtaatgctattggccttgtgttgtcgcataggatcagaacctgtcactcagtctctagtcaatgtgcagagagatccaggtctgaatcaactaggtctcctttgggctgacttccgtgcagggctcaaaggggaggcagatactgccttttgacaatgcaattgtgcctgagagaaaagccttctatggggaagctgttgaagatgacacaaacaatggcaatcccacgaggactatgggaagcagagagtaagtactctggcatattaaaagaatggaggaaaatgactgatactaatccaaccacaataacagcaacagcagcagctaagtgtgggggaaagaaaaatagatcagaccgttactgtgtctatgtagaaaaaggaagacataagaaactccattttgatctgtactaagaaaaattcttctgccttgagatgctgttaatctgtaaccctagccccaaccctgtgctcacagaaacatgtgctgtattgactcaaggtttaatggagttagggctgtgcaggatgtgccttggtaaacatgtgtttgcaggcagtatgcttggtaaaagtcatcgccattctcccgtctcgggtacccagggacacaatgcactgcggaaggccacagggacctctgcccgagaaagcctgggtattgtccaaggtttccccccactgagacagcctgagatgtggcctcgtgggaagggaaagaccttaccttccctcagcccgacacccataaagggtctgtgctgacgaggattcatgaaagaggaaggcctctttgcagttgagataagaggaaggcatctgtctcctgcttgtccctgggaatggaatgtcttggtgtaaaacccgagcgtacattctatttactgagataggagaaagccgccttatggctggaggtaagacatgctggcggcaatactgctctttactgcactgagatgtttgggtaaagtcaaacataaatctggcctacgtgcacatcgaggcacagcacctttccttaaacttatttatgacacagagtcctttgctcacatgttttcctgctgaccctctccccactcattaccctatagtcctgccacatccccctcatggagatggtagagatagtgatcaataaatactgagagaactcagagactggtgctggtgtgggtcctccatatgctgagtgccagtcccctgggcccacttttcttcctctatactttgtctctgtgtcttatttcttttctcagtctctcatctccaccttgcaagaaatacccacaggtgtagaggggcaggcacccttcactaagtcctctggtcctcactgtgtccctgccaggctaaggcttccttagccgtggtaaagcaaataaaggcctgacttaaatcaggcctcctgaatctgacacttgccagctatgtgactatgacgatgtcacatgatctctctaaggctcgatttccgaatcaacacaataactattcccatctcagcaggcagctctaagaactaaacagaaaatgttcacttaggcaatcagtggagtgcctagcacatgtaagtgcctgatgtgtttgggaactttattaatcccctgacaggcccagaggtaaatgtcgttatcacttccatttcacagtcagcaaaggctcagggagctttagaaatcaggcacagcctcacatttaaaaagcaaaagcagcatttgagcaccgctaaaacacctcaccaagctgccagagagcaggcaggtgggagtgaggggtgcttttagctacagccagcactgccaggatgggtgtggaactgcagccccgcagagacctgagaacaatgtctcagacaaagggaagtgcaagggcaaaggctgaaaatgggaaagagcttggcaagctcaggattccctggatgaatgcagtgagaaaggggacaatggaagaggagaaagaagatgcggtcaaaagggcaaaccaagtacagccttgcagaccatgctggtaggagggggtggatttattggaaatgtgatgagagtccctataagagaggcctattcaatcatcaaccatttattaagtacaataaatgtacttaagcctggctgttctgggtcttgggagagggaagcaacaggcactcacattccagggttggaaaaagatcctaaacaggcaactaaataaatgagtaaggcaatgtcagatggccttaaagattcagatgacaagaaaacagagcaaggagaccaaagagactctggtcagctttaaacggtgcaacagacgagacctctttaagcagcggacaccagagggagtcagaaataaagcaaaggagggagaggtggatgagaaattaacaactacgacaggagctgacagtaatctgggctatcatgaaagtaatcagagtgactgctagagagtaaccctgggcctcatgtgttatctccaaagggacactacatcctgcataccatcgccactgaacattttaatggactcgtttttcacctgtaactaaatgtcttaaacaggaaaatatactgttagttgcaacccagcgtcccttgccctaaactgaaagacaaattcctcagcctgccctaccaccttttctgccctggcatagcagcaaccgcagaaacgctcctcccacctctttcagccgctgcccttcgtgttgtagagacaggaggccaaggaggccagagggtcagactcctgctggggttgagtctccaaacctagcacaggcccagggagcagctccggaaacaacatcctgagcgacgtccccggaccgtgctgtgcactgagacggacacacacacatcacccagggagccgttcaagcttcctcaaccccgggggggggaagagtaaatatttctactttgcgcgcgcaaaaatgaaggacgaggacagtaacgggacttgttcaaggtcgcaggcccgagaaaggacatggttggaagagccacgaggaggactgcggtcgctcctctcacctgtgaggggttccgggaccctaaaagccctatttcataccacaacgccgcgcaccccagaaacggggacgctccccacgccaccgcgggcctgcattccggacccgggaccgcgcgacccccttctaggcctctaagaagcaacggcagggactgcactgaggacgaccctgaaacgccgtccttccgctcgtcgggcccgggacactgaggccgggtggccgcggggagccgagccagtctgctcacctgcgctgcgtccttcgtctccgccatccgaccgttggcaggacgaggccgcgtggggcagctcccacgggctcaaaaccctaccccgggtcctacaacggtgcggaggtgagccccagtcgccctaccatccttcccagcacagttctgagagcgcggaccaacacgccccaccacaaacgtccacgccagcgaggccggaagtcccgcccctgtgtcgcggtcgcctgccacgccttttcctgcgccggcccactgccttctaggtaatgtagtcttgtcccgtaagaggccaggcttggctctttttccttttttattatgcacaccatgtttctgtatatctcagatgatcttagcggagcaagtgtacacactggattgtaaatttttaaaacttcctattattcggatgcctcaacgtccctacaagcaggctgtgagcactcgcccaggcacccaggtaaacgagtttgataaagggggccctgccacgaggttccccgcttgcctcctctgagtgacccagtgacattcccatgtaccagtaaaatcttacgcctggttactgcgtcctcctccaccctgacgccaggcactgtccctgggactggcgtggatctggacccccgcttcccgcgtggagccattcccgggacatgctcgtggggttccgtctgtgggacgtctgcctcctctgtgtggactggtgttgcccagggctcaggaaggtctccaggggccgtgagtccccgcccgcttccggagtccagcttcgtgacaccatcgtgagaaagaatgcagggatgagtcaaaatgaagccaaaggcaagaagcttttattgggaagaaaaagtacacatttttgagaagagtgtacttttcccaagagaagagggaaatgcggacgtacgagggagagcgggtcatgcacaatggagtttgggtttctaattttatgggctcttctaattagggggtgggataatcatgaggtttttctaggaaaaggtgggaatttcttagaattggggtgccaaccatttttatactaaatgtgggcgtgcttggattggcctggcactggtgggtgtgtgatttaatgtggcaatgagtgtataattaggtctggggtaggaaatgggtcaaatctagcgtcatgggacagcctagccccaatcctgtttgttaaggtctcatcagcccagtcttcttgttggagtagctaattttaacagcttgatgttttcccccttctcctgtgaccacacagcattcctattttgtgggtgtttctttaattagagagtggaataattattaggtattctggaaaaggagggaaattcagggacccacctggttactgccccctttctctcttatttggctttgcccagaagagtcatggacatgtcatcctgactgggattttggccattctttctcttattttgggttttctgttatcctatggtttctttgcctagttcttgtttttatttgttgttcgaatttttccatcctcctgcaaccacccagtgctattcctatatcactgtgagtataaacaccctttaaccttataggcttcttgaagtataattcccaagaccatgttgcagtggtccttaaagaaccaataaggcagagagaaacaaacatgttccaaattttgttctcaggagtaaaccttactcaattgttaaaggctgtagctagctcaaaagaagtttccttgactctgaaaaacaaaacaaggatcagcaatgttccaagcaaaagtcaaaaagattatttcagtttttctattagttcagcctattctgttaactcttgttctgcttgatatttataaacattttagcttttcatgagtcctgtatgtttttcagttatcagaaacctgcatttaggaatacctgttaaagtattcctacatctgattatgaaccatattttgaagaggattaaaacaagacaacaattgtctgtaaatgacaaaatgtccagggtggttagtcaaaaacatgattgacaaaaaaaatttggttatctccgtggtttacaataacaacataacaaccttaattgtggttgatagtgtatactttcacattagagttttctaaatcccatgcagttttggaacacatattaatagtatttgctgaaatataacctgaagaagattagacatcattttggcaatcccatgtaacaaaacatgtcaaataatcctgcttgcctcttttctggatgccccagggaccctctgtagcatccaaaacgtaggtgtcaagaaagacaattgatttgtggaagcctgttaaatatgttaacaggcttaaaatatttgatgttatgtactagaattccagattactataagttatttattttgccaaaatgatgactcaaaaatttgaaaaagcaaaaacctttcattagcctttactattacatgaaaattgtgttcaagagagagaaagccaaatttcacccttacattagtgtactattaatgtcaaccacaatttttaatgaaacaattataggcaattctatccaatcttaaccagtttgacaatgaggtgagattttcacaaaccttttataaccctttacaaattttgctaaagagtagattcatgcattaagagttctttgttgtgcttttatttcaatgctcaatttacagaaaaccacataatacccttttgaatgtagtcaatatattcacacagagtttcctttgcaagattaattcttacaattttttccccagtttgcttaaaccttcagttgtattttatctactttaagacaattctttatccctaggcaaaacgtacattgccatgccttcttataattttttacaaaaaacacattttactgtttttacacacattgcatgtaaatctattcagtagtctcaattacatgtcataatggtaactcttagcaattttttttttaagatggaatcttgctctgtcacccaagctggagtgcagtagcacagtcttggttcaccgcaaccaccacctcccaggttcaagcgattctcctgcctcagcctcccaagtagctgggactacaggcacatgccaccatgccaggctgattttttgtatttttagtagagatggggtttcaccgcattagccaggatggtctcaatctcctgacctcgtgatctgtccgcctcagcttcccaaagtgctaggattacatgtgtgagctaccacgcctggccctacctcttagcaatttttaactttagtgtaaaacctggtaagttgttttaattatttgctgggtgcagataaagtttaactccttccagaataagttaggggcttggttacttccatatgttcccagactttacccattgtgaagcaggcaagttgaacagttcttaaaggccaaaggagcagtacaaccttaaaacatttagcaaacctaccatctgacctgcataatttagaccacatatttacatcttgagtacatttgtattttaccaataatccctaagactgttttatttttaaagattaaagtcacatgaactaagagaaattacagtttttactattctttcaaaaaagatttgatcggccaggcgcagtggctcacacctgtaatcccaacactttgggaggctgaggtgggtggatcataaggtcaggatattgagaccatcttggccaacatggtgaaaccccatctctactaaaatacaaaaaattagccaggcatggtggcacgtgcctgtaatcccagctacttgggaggctgaggcagagcaattgcttaaacctgggaggcggaggttgcagtgagccaagatcgcactactgcactccagcctggtgacagagcaagactcagtctgggaaaaaaagaattttatttgatctaagtgcttataggccaatcaattacagctcttttttatagacatcacacaacacatatatgactacacagacagaagaagatccagcagctcagggtggagccctttaagaataaggctacaaaagcatgcagtttctggggcctaataaacaggcatagctcgaaggccaaaacagattttgagagggatttatccatctctaattcttggggttccatgaggaaaacagatttcccccaaattgaatctgtggcaccttgtctgttttctcaaggagtccaaggccaccagaagtcatccttgagcctttcatgcatgcaccaagattggcaagacagagtggagaaaagtaattcagttgactgagatacaaaccttttccagaaaaacaagatctaagaagagaaaaacataaaggcgtttcaaggacacctataacttgggtatccacttttaattaagctgagtgctctttcataaaattcttctttactaattaaaactttacagataatataaacaatgatccttatcttttttttttttttactggtttgcatcactctttgttcacaatcatgttcaggttctccagtttacttttggggaaagtggctggattcaggcaaggacaggtttttaactggactgtagatccctctaacagcaagccctgatatttgaagaggcaattgtctgttagccagagacttcccttagaggatagcagtcctgctatattatgtggggtctaaacagttattttccggctgggtgcggtggctcatgcctgtaatcccagcactttgggaggctgaggtgggtggatcaaaaggtcaagagatcaagactatcctggtcaacatagtgaaaccccatctctactaaaaatacaaaagttagcagggcatggtggtgcacacctgtagtgccggctactcaggaggctgaggcagaagaattgcttgaacccaggaggcagaggttgcaatgagccgagatcacgccattgcactccagcctggtgacagaacgagactctgtctcaaacaaacaaaaaacaaacaaacagttatttcccattattaacttggtggcctctggcacgagcaaagccaccaatgcaacttcttggaggaaggctggccatcctttaaccaccaagtcaagttccttgcttaggtaacccactggctgttgagctggacctcgagcctttgttaaaattccctgggccgtttcctttctttctgatacatagagattaaatgtgttccctatgagaagactgagggctggtgttttaagtaatgcttgttttaactggttaaggcttttgagttttaagattccaagtattagttgcttgagtttcttttatgaggtggtataaagggtgaggtatttcaccatatccaggtacccacagtctgcaaaattcagtaattcctaagaatccccttaactgttaaaggaaatgggcttaatcctttccttacctggtgctcttgtcccttctgataagactagacctaggtactttactgaagtctgacagagctgagctttagattttgaagtcgtatatcccctttctgccaagaaattgaagagagcctcagtgctttcctgttacttccttggttggagcacagaggagactgtcatttatatacttcaaagtttaaacttgagggtgagaaaaattagaaaaacatttggacagggtctgtttcagcaacttccttctgatatcggggggtgcctgagtaataaacctgctctttattgaattgggagacagggaggtgtgtttcactaaggcctctctcagcctttccataacggctgagggattttcatctgatttttgatttaacatggattgtttagagtaattaagaggtttggttttgttttttgctagccttttaatatgcacatcagaaagtgtattccactcatctatgcgatgactagtctccacttagggttttcaaggggcactgtttatcttcctactgggaatgggaatcctgtctcttttttaccctctttccccttttgactgggtttcttttttgactggctataggatacatgctgtttgtcggtgaatctctctgctgccttagggctgcctgtttctcagcagcagttagagtttggcttaggagtaacataacatctccccatgcaagatcaaacatttgggttagattttagaaagcttttatgtatctatcagggtcatccaaaaacttgcctaagaccccctttgtttgtctaaggtactgcaatgatatgggaacttgaactctagtggcaccatgtccattgggcatttcctgcagggtcaacagtgaagttgagttttcttgtgtggcacagctggaggagctgatgcttggctattggaggccccagataagggatggggaggtagagcatccagaagttgcatttgagggggttttctgactttgcggtgttgtccactgtgggcttgtctgatatgactcttaagagggcagagtcaattttgcagtgcttacaaagagctgggctgtttcacagggcaaagaaggcttgcacataggggacctcagaccgtttgccctcccacgtgcagaaaagatctagttattggatattattgaaattaacacttccctcagcagcccaggcctatccatcctggagctggtaagatggctatgtcctcgtacagaagaatataagccatttttcttcagtctcagggttaaaagtctcagtgtctcaggatgcactcaagaggagtgcagactgaagatggtttgttacctgttttaaaaagagtaggagaaaaggcgtcccttggtctttttcctttttttggtgtgacccagggtggagggaaagatcgaaagtgcatcccacttctctttcttcccatactctgggtcctggccaccatcataggtgtcacccatggatgcaagcatgaccttcacccgtggatctggaagagctagttgggtgtaatagtcatgcttacctgtatgaggacctgactctccacgctgctggtttcctagtcccaagtggcccataaggctcccagggtaccctagtggtctgggagatattgtatttgggtgagaccctttaatggagggagtgttttaatactatctctggcttcccttgctatggccctagcaaaacattgaaatcccagagaatgggaccgattgacttccaaatatgaaatcttctttttatttaaatgccagtgtagttcaatgcagaacaggtgactcaaaagaacataaggattgagtggctgttctcccgactgttaaaggtacagctttgctgttaacagatggagcatggagcttagtccctaacagaggcacacaggagggagaggaattggggaactaatggttttgcacaaagggcagatagggctccttatggagaaaaaatcctatttcacttggtggcgctgtaggatctgaaatgttaaataagaactctgactccaaattctttccaggaagaagttagaaagagaggtttgggcttaataggctgtccccattgtatgccttccagaagaagaaaattaacttgtctcataatggaactgtctagattcattgggcagtcctgagcttttacatggaggaaaaacacaacccaaatggagagggagaagggtattcactcagcatgaaatatcccctctatacagtgccatgaatgtctgtcattagggacaaaaagctctcactaggtgaaagtttagacagaaatcctctaattgttctaattagatcaaacctctatagtaaacagttcaaaaattatagtgtcagggaatcatcttcatggttgctggacttgtcatcaacatccccaggatctagagttccatcttctggcctatctggaaaacctcacagacatctacccagtacttctaactaaccatagcaatcccaaagtaccaaaacccctacttattcagtggaactctccttcacttaatggattccacctgaatgtccccttccacacttgccattatacctggacttgaaaagttgagtatatctccagtgcattaatgattcttttgcactcactactatgttaatgacacaaaagcagacgtttccctgtgatgctctgatctaactatagttaccaagtttccaaggcaacagcaaggtaaatggtatttcacttgtaggcaagaagaccatatatgatgtcttctcccagaccagaacacacgggaaaaaatgactgcctaatctgggagggtgggagtactattcgcttctggaaaacaaggtttgtttgaccacccccattggaacaggggaagaatatctctatagacccaacttggcagcaaaggatagacattacaccctgtaggacctctatgctccaactggactcatttttgtttgtggccatgaatgagaagtcacatgctgtaactactcctggctccccagggagccatctgttcttttaggagtagctttcccttatatatcaaaaacttggaacaaagataaatgtatgttgaccacccttgcccctccaagggtcacagtctataacccaataaggcccaggaacaccagaagtcaacaagcaataggattaattctggtgggaatcagggcagccataggacaagcagcaccctagggtggctttgcctaccacaagtcaaccctaaagaacttgactcaaactctagaatccttagccaccaacacaggttaggcactaccagcaattcaagaatctctagactctttggcaaatgcagttctcaataacacactggcattagattatctactagcggaacaaggtaaagtctgtgcagttaataaaacctgctgcacatatattagcaactctggataggttaacattcaaaagatctataagcaagtgaccctgttatgtatattttctttggctcttgcttgtttaacctcttagtaaagtttgtgttttctagatcaatagtccccaacctttttggcatcagggaccagtttcatggaagacaatttttctatggatggggtatgtggggctggggctgggggctggtctcaggatgaaactcttccacctcagatcatcaggtactagattttcataaggagtgtgcaaccccagtcccttgcatgcacagtttatgataaggttagcacccctatgagaatctaatgctgccactgatctggcaggaggtggagctcaggcagtaatgctcactcacctgccactcacctcctactgtgcagcccagttcctaacaggacatggaccagtatccacaggagaggggttggggtatcctgttctagttccaggtaaagacaatgctggcacaaggcttccaacccatccttgtctactattccagagaatggaagtgtccttcctttggggaccttatatgtggtatccagggatgtttactcctttagtgctaggcagggcctaggcccacaaaatcagcagcaagcagtcacagagcccccttaagattaaagaggagtatctaatctctgatgggagagtgagataggaggcaggactccataccagactgaagactggctgaaacagggaacaggcaccaagagcatatctacataatacacacccaccagtgccatggcagtttaccatcaccatgacaacacccggaaattaccatcccttttctagaaatttccaaataacccaccctttgcatgtagttaaaagcgggtataaatatgattgcagagctgccccctgagctgatactcgacacactgcctatggggttgccctgctctgtaggagcagccacagagttgtaaccctgctgcctcaacaaagctattttccatctaccactagcttgctcttgaattctttcctgagtgaagccaagaaccttcttggactaagccccaattttggggctcacctgccctacaacgccacctgatgtcctacctctgtgctttctaaaaccatctcccttaccactggaagaatataacttaggcctcaggaaatgaggataattcatgctgacataaggagctctttaaaaaataaaaaagcagctgggcgcagtggctcatgcgtgtaatcccagcactttgggaggccgaggcagctggatcacctgaggtcaggagtttgagacaagcctggccaacgtggtgaaacctcatctctactaaaaatacaaaaattagccgggtgtggtggcacacgcctataatcccagctactcaggagactgaggcaggagaatcgtttgaacctgggaggtggagtttgtagtgagccaagatcatgccactgcactccagcctgggcgagagtgagactccatcaaaaaaaaaaagaggcagcattatataataagatacctgggggatattgatggacatgctaccttggagtcctgcctagctcagccccttcttcgagaataatccactacccacagtcctgttaaccaatctctggggatacctgacccaaccaggctagatcaagttttcttgcctgaattctggaataaggacctcagacagagggcagagtgtgctgggcactagggtgaggatttgtgtttaaagggctgtttctaccccagtgatccccagtgcagacacagggagaccaggcaaaagcatgtgagaccaaaacagagaatacaacaggacctgtgggtagagggagaagggcttgagatgcctttctcaccaggcagtatgtgcaagaggatggaatcagaggactagggtcacccacatgggacagaaataaagctttacccagcaagaccaagagcccacagttctgcagcctcacatcttggtgcagtgtcctctgggccaggcccaaatatccacatttctaccagatgaaggtcagggccatgaccttgaaaggcaccaatgcctggcaagtcaaacagaaagttgacctcagactgttagatattagaacctattgcttggtcactgggaaaggcacagagaaccaggacatctgagggttgagctccatgtagggcacaagggtgagggacactgcctctgaaaatagggtaactgtggcagaggataaagcctatgatgggggatgtcatttccaagttaaggtttctgctacccaggctccttctgattctctacctcccacatgtcctcctgcactcacattaaatcatcccaagtaatcctccaggttgcttgcctggctccatgctctgacaatcatgctgcagaatggagctgttccctctaagccaggctatgcctacactgtcacaccttgtacaaggagattgtgtgtgttgtaaaaatagacacagccagttactagatgtgtagatgcacttttaccacaggcacatttgttttgctattacctcctccactttctattaatcatacccaaaatttctgtaccaattatgtcccatgcttagctcccatcagcttgagtaccaccatctatggaatcatgggcatcagggcacataggttcctttgcagaagctgggaaaaagcttcgtctcaacagtgctgggcattacagcctgtagaacaatgcaataaatccatcttattccctaaagcacaggagcctgtcataacagccgacttgtcctcaggatgacctctggtccagagaaagtgtagggatccaggccataaattaggacaacaaaattcttgcattgtttcctaggaggccttgagcagcaaggcaaagtggactaaaaccagaacaagaactactgtcattttacttttcctgcacaggccagcaacattggggccccacaaaagctgtccatgcctttatgtaggagcccaaatgtgttttccagccacctcacacagtaaaccaaaccctaagaccacacatagatttaaaaataaggcctttattaccacacaaaccagagcaatgtgaggcagccagttactaggtggtgacttggaggctggaaaaactaccaagtgttgtgtgaaaacaagaatttccatgaagggaagccttccacatcagcttccagcagaacccaggctgggcccttctggccaaaactggtcagatgtatgctgtaatcagtcagaaaagggaaggaattccccttaaaggctcagactgctcaaggaatttcctccaagggttgggagaacacaggtgtatctgcctcgccttagtatgcaagggtgactaatgatttaactctggcaaaggcctccagcagtttagaacatgcaaaggagctcctgcaagacacatatgcctggaactaatgggagtctgacccatcgggaggtctagaagtatgaggtttaactttaggcagacggctccttcacaaaggctctctatagccataacactgaagaaagacatggcacattccctgcaggtctaaggcttttctcaggtttggagtttcaagagttaaacaatgttagatcttgggctgtagggttttccacatttgctgctgtcacgaggcctctccacagtgtgagattttcggtggagaatgaggccagagtgttgtgtaaaggacttcccacatttgccacactcatatggcctttctcctgtgtgaaccacttggtgttgaatgaggctagacttttggataaaggatttcccgcactgtccacagtcgtaaggccttaatccagtgtgaattttctggtgttcaacgagggtatagctttgtctaaaaaatttcccacattcactgcactcaaaaggcctttctccagtgtgagttctctggtgcctaacaagtttagatttgaacataaaagctttcccacattccccacatacataaggcctttctgcagtgtgaactttgtggtgtttattgagggtggttctttggctaaaggattttccgcactcatcacactcaaagggcctagctccactgtgaattaactggtgctgaatgaggccacactttaggctaaatgatttcccacactggccacactcataaggccttgctgtagtgtgaattctctggtgtacaacaaggctgaagctttgtctgaataatttcccacattcaccacactcatatggcttttctcctgtgtgagttctctggtgtcgaacaagagtggatttggacccaaaggcttttccacattcatcacactcataaggcctttctccagtgtgaattctgcaatgttcaataaggttggaactttggctaaaagatttcccacattcaccacactcgtaaggcctttctccagtgtgaactctgtgatgtttaatgagggtggctctttggctaaatgatttcccacactgaccacacacataaggcctttctccagtgtggattctccgatgatcattcagatgagaggtttggctaaaagatttcccacattcactgcactcataaggcctttctccagggtggactctttgcagctgaacaagggagcactcacagcagcaggctttcccacatttgctagattcataaagcctttttccagtgcagactctagggtgaaaaaaagtgtgtttgtggctggactctctcctgcattgactccacttgtaatgacttattccaacatgaaaggcctcctcacatttgctgattttgtttggcttctcatagttagcaatagcttgcggctgaagaatgcccaatggggctaggaagtccttcccaacctcactgctggtgaaaggcattcctgactcatggaacaggcagcactgcacaaatgaggccttgtccatgtcactttccaagggtttctctgcactatgatgcttctggtcctggtgaaagaccgcacatgccccagtcaagtatagttcctgcccaggcaaatcggtcaggtgcaaaatgtcggtcaggaatgggacacacatgtcacaggattgaatcttctgggtggatggactggcctctggagtcctgacctgaggtactccttctacagaaacactttgctcaggtgtctcttcatcctccatcccatgccaacaaactgaaagcagagaaacactgatgaaatgcacgttgactatgatgggagtgtattagtcatttaaaaaactattttctgaataattggtgttctgacatcttaaaaactttgctggcctgagctcaggagtttgagaccagtctgggcaatatggtgaaaccctggctctactaaaaatacaaaaaattatccaggcgtggtggtgggtgctactcaagaggctgaggcacaagaattgcttgaatccgggaggcagaggttgcagtgagcccagatcgcaccactgcactccagcctgggagacaaagcgaaactgtctcaaaaacaaaacaaaacaaaacaaaataaaaaacattgctggctggggagagaatggtgcttccagagtgagccaactcttaaagagatagcaaagggctcagcaaggagcataacaaatacaccatcaatccagagcccatactcccaatcacattttctatgtgacttggatgcttcaggagctaatattcctctgctctagtcatcccaaggtcaggcaggagacaactacgcctagtgagcccctttgccccaaagcaaactactcaaattacccaatcctaaactgtttattatgtcttgtgttacctgcagaaaccccaataaaggctgtggcttaatattttccctcctctcttgcttctaccttctgaccactgagcacttcctcatgtggccctgcatggcatggtgttcacatgctcttgctactgcaggtgataaattcctatgtcactgacattaacctctctgtattggcactctactacctccattaattaaaatcctgtgggtacataacaggaaatgggaagcaccttcacatatacatcaaggaatgaattcacagtattgctttgaagcaatattgaggaactgaaagcaggataagaaagaggctgcttggcagtagtgggcctctaaagatcacaaaatggggaggcctcaccaaacacaggacgtaagaatggggtacagtacacaaggagaggcagggtctccaatctattcttttgccaaatcctgtggcaagatcttgtcagctggtggcacgtgtatgctgtgctgaaagctggcattattcgggcccaagataatgcaattggaagtgagtgggagattccaattgcgatcttgtgttcaagaaatatttaattggcatgtgcacaactcacaacatatcgtgagtgggtcagtgttggaaaacatgctggggggcagtgcagagaaactggtgacacatggagggcaggaagatgggggcagcacgaggccggatgtcccagatgaagcaataagccagcaaagtgtcaaggaagaggaagaaaacatagaaatgagatgtgtccagtggcattagcaccaaactctggatgacacagggcaaattcctggtaagattagaaaacaggctggatgccatgtcctcacccaggtgccactgactgaggccaggcttcctctgaagccatattcccatcttcaccctttccaacaaccagggctttcccaccacctctagatgtgccactacttgggacctgaatgaagcaagtcctaagggaaagctgggacaggtgagtatcctgcagtggcccagagcaagtcagcagccttgagaacacaagaaagaaaattaatatcacacagatccttgaaggaggttctggcaaccacagctcatggtccatgtaaatactgatgaggaaaattctgcaaattcctaacacaggtagtcaaaggaaatgtcatctaggaggcagaatttgagacacaaagtaccatgaatatggacacagccacccaaagaggaagtgaagaagtaaacggagatgcattaggctgactcaagacacctaacagccagacccatccctgtgcattttgggacagcaaatgtcagggctgattaaggagtgcaatgatttcattccttacaccacagcacatacgccaagacagtggggaagtcagcaaagcccacggtccggcagagctgcctctgaggaaaaagaggatagacgaagaccaggacacgagagtgggtgtgagggccttacccagcgcagttataagtgcaaagttctccagcatcacatcgcggtacaggagcctctgagcctcatcaaggagcccccattcttcctgggagaagtaaatggccacgtcctcaaaggtcacacagccctgccatgatggggatagatctttccatgatcagattctctcctaggaccccaagttcatgccccccacacatcctttccctgcttatccccatacctaagccccacctcagaggagataccaagacctggtggcactgattcctgccctctcctcatggtcccatcatcactgtgtcttcccacagcaccaacaggcaggtgggccaggaaatgccattttaaactctgggtctagcatatagggctggattttgtcttgtcagacagttctcctggggtttccaaaattatgccactcacatacaaacaatgatgaggtttgccatcattcttatatcctcaatgccatggccatgggttgttcagttcacacttcctctccatatgcacatcactctttgaagcacacactctctcaaacaatctcactcccacggctatttccaccctgttgccccacaccataggcatctctctggcatccccacgatagttggaatgcaacattcagaaagtgcttggcaaactgaaatgaggtccggtgccactcaggctgaatggtccccactgccaaaggcagcccttcagagaccctgctctgaaggcctccctgcctgactctgtccctttctacatcctcagtcacccagaaatacctggggatctgacaccgatggccctcttgcactagcgctgcacttgatgtcctctcttaagtcacagccttcctctcctgctaaccctcattcaaagtctgccccaggggacccccacacctcaggcccaataactcccagatgaccacctgtgcccctcaacttatccacctccctgaaattcctgacacctcaagggttgccacaaaaccctggtagatatatccagagtgctgagtaagcactagttctggtctcagtgtcatcttgtctcaattacttccaagcattgatctcatgcccactcttctcctagatccttggccacttgccagatcatccttgctctcacaccctaccatagccacctctctcccatacctgtctttgtgattcccaccatgaccaaccatgtccccaagcaggagagccagtagtgacccccaaccttccttccctgggctggtaatagcattaccaaagtgatcacgattccacctcctaattgtgtcccaagctatacccctaggcaagtagtggccaccaccttttaaatgtctctatcctgaatccctcaacacagttctagtcctgtaggataaactatccacttcatgtctaaactaactgttctttgaaacatctcagactctaaaagatgtcccattgggccatgttcagatgatttttattaaaaaattttaaaaataaagatggtccatatcaaaatttctgattatctctagagataactgactctactaccaactttacaatcctcgctagtggagcttccatatttccagctgctaaacccaaacaccttgcttttacccctaaatcctacttttctatctcaaaatccaggcttccctacttaaaaaaactgatctaaaatccaactaccacctccacagccaccacacaagtccagccaccagtaacactcacctggactactgcagcagccttcttcactatcttcctatctcatacctcacactcagcctgttctctcagcttggccacacacagggaacctgatgagacctggatcagatcacatacctcctctgcccccaaactgtcattgctcatcacacactccagaagaaacacccgacaactgacagccattttttgtctgattcctgcatcccagctttcagttcccatgagaaagaaaacagctgtagtttcctaaaccagctcagcctgaccttcaagcacttgctcatctggtatctaagcctgagacaacgttccacaccttactttactggttcccagcaataggaaccattctataccagcttccagcctggatgtatgaccctgggactgatgtttgttcaggattcctagaaccaaggacccaaagagtgccaagagaagagtcccagaacacaatctcagagacaaacactggggtcagcatcagtgagggcccgaaacactctccactcacctgtgtaaagcccataagtttagcttctgcagtcacgggaacctgcgggaagaggaaggctatgagaggcaggtaactatggtggaagctccatgggctgatgcctccttgtttccctgcgcagccctggagccaggtgacttggtgatgactaaattattattgctcctcagttccgtgtgactcttacctgctgtgggaccttgcacaaggactcaacttccctgtgcctcggtgttatcccccttccaggctgttccaactctgagtaactttagaaaaaatttgaaaagtctaactcagaccatgtgcctcgtctgttcacaaccacccatggctctcagcgtcttgaaaagaaagagcctcattttaccattcgggcgtgaacgttactggctcaatcgtcccagcaagattcacagaaaccggcccctccgcctgccacaccctccacagcccacgacaccaggcttgtaaatgggagccccacccgcgagggcctcatagtcctggactctagggtcgggctgcagggacgcaagcaggcgcccctcatgcagggtgttggatttccggcggagagggcaggtgaggcccgggagacgcagcactcaccgaagtcgaatccctaagcacggccgccgccatcggattgtgagcggagcggggccgggagcggcgggcgacccggggcgggaacccaggcacggctgccaccagcgccagcgacccaccggctgatgcgcagcggggcgacccccgctctgtgccggaggcagcgtttctaactcaggcggcgtgggccgaggtagagaaccaccaaaattaccatctcggagcggtgccggaagtcccgccttaccgtatgcaacaaacggagacaggtccgttcctgaacgttgattggctccgcgtctttgcagcttggcgctcggcattatgggtaatgtagttctcagaagcccagggttccggtgccctccctgagattcacccggaacaagggctaagcggcccgcggagggcgctaggaaaaggcgcgacaccaagagcgagacagggacttgctgctccttaaaggggccgctggccgatttccgcagtcccatacccactgaagggagtgtctgggttaagataagaggttgtagagaccaaggttcttattaagcagatgaagctttcacgcagcaggcttcagagggaatagattgtaaatgtttcctatcagactttgaaaggtgccagactcttaattctttcctggaccatgaaaataaaaaaaccctggagaggaaaggggattctcagcaaaatgcagattccacaagacacacctttgcagggcctcttcaaaatatgtcaaataaataaagtttagagtaaaatacttcaattcctttcagggcctgctatctgtcatgtaatgctatactacaatcaggctggaattcactgtcttattgctacaagaagtcttaaaatctctgttttaatgttaatgctggtcagttgtgcctgaattccaaggggaggagggcaagtctgaccctcacttcccatcacgtcctgaactagtttttcagattaactttggaatgcccttggccaagaggaaggatgcattcagatggttggggggctgggaattttatttttggtttacacttctcatgcctcttggaatctctgaaccacatacaacggccatttgttgagtaaaagcttccaatgcaggaaactgtctctttcagcctcatgctatacaccattaaaacagtaattactggcaataagactgggctttcttaaacatacaggatctcacagaccataagcctatgatccttcataccagctgcccataatacttttggttttggaagcagcaccccataacctcagcatggctaccaaggcctccttaagacagggtagaatgaataagatctagtatttgatagcacagtagagagactacagtcaacagtaatttattgtacattaaaaacaactaaaagagtattataactagaatgtttgtaacacaaagaaatgataaatgcttgtgtaccctgatatgattattacacattgtatgcctgtatcacaatatctcacgtatcccataaatatacatacatactatgtactcataaaactaaaaattttaaaagacagataaatggcaagcaggtagatgaaaacatgcttaacatcattgatcactataaaaatgcaaatcaaaactacaatgagatatcatctcactctagttaaaatgacttttatgcaaaagacagggaataatgaatgctggccaggacagagaggaaagggaaacttcatacgctgttggtgggagtgtaaattagtaaagccactatggggaacagtttggaggttccccacagaagtaaaaatagaattaccatatgatacagtttacaccacccagaaaagaaatcagtatatctaatagagatctgcactcccatgtttattgcatcactattcacaacagccaagatttggaagctacctaactgtccatagataaatggataaagaaaatgtgatgcatatacacaatggagtagtatttagccataaaaaaagaatgagatcccatcaattgcaagaagacgggtgaaattggaggaaattatgttaagtaaaataagccaggcacagaaagacaaacttcacatgttctcacttatttgtgggagctaaaaatttaaacaattgaactcccggagattaagcttagaaggatggctaccagaggctgagaaggatagcagaaatggaagggaaagtggggatagttaatgggtgcaaaaatatagtcagatagaaggaataagacatagtatttgatagcacaacaaggtgactacagtcaacaacaatctattgtagaattaaacataactcaccgggcatggtggctcacgcctgtaatcccagcactttgggaggccgaggcgggcagatcacaaggtcaggagatcgagaccatcctgactaacacggtgaaaccccatctctaaaatcaaatctctataataaatctctaaaaatacaaaaaattagccgggcgtggtggtggtcacctgtagtcccagctactaaggaggctgaggcaggagaatggcgttaacccgggaggcgttgcttgcagagagctgagatcgcgccactgcactccagcctgggcaacagagcaagacttcgtctcaaaaaaaaaaaaaaaaaaaaagaattaaacgtgactaagagtataactggaatgcttataacacaaagaaatgataaatgcttgaggtgatgaataccatttatcccaatgtgattattacacactgtgtgcctgtatcaaactacaccatataactcataaatatatacacctactatgtacccctaaagactaaagataagaaatcaaaaaaataaagacaggatggagctaaacctgggccctctggaatgttctacctgcagatggagctggcctccactatcttcagtcccttgctagatgtcatggtccttgaggtcaacactccccacacctgcggaatcccttgggattaactgggtgaacagtaatcgaagttagtggactatatgaatgacgctgccaagctatacttgaatagctgtgccaaatagacaaacacagaaagaaaacacaaaacaacccatccacatcctaagggcttcacactttcttgcactctatcttcaatgttttttcagctttctctttaggtacttattgactgttggtctcacataagtttagccatagatggaatttattactgctttgtgaccactggcagcctccctcatctctggctgggcttctccctgaaggactgggcctcaggagtaggtgggtcatttgtcccctgggcatgccacacagagcaggttttccgaactaggctatccctcctccccaagttatccaggcaattccgctagttctatgcctagatggacacacatgcttgaagtttggggagccatgtttgatgtgatgtggcaactctgaaaggacagtgagggtgagggcaggtgttaggtggccattgtgggggctgctggcctctgggaccagagggtaatgaggtgcacaaccgtgtcacctagagggtgccagtgttaataaggaaaagggttgctgtccgacgcacacagaagccaatgccatggcaccaggtttttgagaaaagcaaacctttattgcaagtcgacaaacaagaagacaggagtccagctcaaatctgtctccccaatatggggtttggggcagcttttaaggattaggaaggacaggttggtaagcactggaagggtggattttgattggaaggacttcaaacaaatctattgatggcaaggcggggatggggttgttatcacccaacattcagagacaacagaccccttgctttcggaagtgtttcagcacttgggttccagccatagcctgatattttggtttcctgtggtgacagggtggagtctggtaggtgagacttcagctccgagtgttgggtcaatgttttcttttctcttttctttttatttatttatttatttacttatttatttattgagacagggtctggctccgttgcccaggctggagtgcagtggcataatcataactcactgtaaccgtgatctcctgggctcaagcgatactcccacctcagcatcctgagtagctaggattacaggtgcaccaccatactcgggtaattttttagtttttgtagagacggggtctggctatgttgcccaagtggtccttccacctcagcctcccaatgtgcttggattacaggtgtgagccaccgcgctgggcctgacattttcttttctgcacattctctagctgtgtaacttgcaactctttagctctgtgcctgcaaaataactggacattatgttaccaacagaggatggccagatgagactggtccagtggttaaacctgcaccttcatggaggccattatgagtatccctacaggccgagtctcagggtgcccccagaagcccataccagccgctgtaaggcagagcatggacttcccctcggggactaaatcccattcttgggctccagaggccttgttcctaccactgtacgccaccgcttggggtgccctgggaacccgcctacctccctactgccctgagggcggttggagatggtcccagcaggtgtgggagatgaggtaggagacgtcttcaacggggtccaaggctcatctggacccagttctcagccgaggggcggtggagagggcgtcagaaaacgcaggaacggctcctagacccaggaggggactcagggaagcagaggcgctttcctcggcggctctggggccttcccagctcgcccggcccccctggaggagacgtcccccggggtggagctacggagaaccccttcccatgggacgtctcggccccgcctcccgcctctgggtacagtcaaagggctcaggtcagagcaggagcagccgggggcgcggcccccacgtggcctcccgggacacgtgcccacagcgcgacacctaagtcgctcctttcacagaatagccttggccccggcacggcctcgaacgccttgaccccgcaagggaggggcacgaggctcctttgctcccgcaggagcgtcgaatacgtatggaatacgcgtcggtgtggatctggcctcagcttcctgagcctgaatcaatgcttctaatcacgtgggcgctcagccgcgacgggaccacagaaatcgaccagcggcctgtttaaggagcgacaaggcccagccctctcctgcattgtggcgacgccatttccctgcgcccccagcgcggccgcttggcttttgtttgaggtgacgctgggcggcagcatccttccctcagccctggggaccagcggggactacagaacccagaaggttttgtctccagccgcagggatgctgagccaatccgcgctgagaaaagggtcgtttccgctttgggaccaatgggtcggggagggacttccggtatcacttcagtggcggtcatttttgcagcgcttgggtgcatccagaccgtcagagctttgggagcgctttgtttggcgacagtcggaaggcgcgaggggaggggtcctcccgctgaacagtgggggttctaagggtcggcggcggcggggttgacggctttgcctaggtccctccgcccgtagctgtcgggtcccggccccgctctgcccacagactccgatggctgcggccgcgctgagggccccgactcaggtgagcgctgcctctactgggcctcaccctccatccccaaattagtgccttcttgggtcactacggtcgagatcctcatgtccagtacagtgggggctcgtgggtggggtccctatttccagaacttgggtgatggggcacggaagagggttacaggcaaagggaccagcgtttctaaactcttggagacacagtgaagaaggttcatacctggagtgccaaggtgaggagttttccctcaattcttaggatgctaggagccgtggagggttgtgtacagaagcggcatatggtctgagttaggtctttcgaagttttccaaaaacctcatggagttagactagaatagaatggaataacacagaggcacagggaggttgagttcttgtgcaaggtcccacagttgctaagagttggcactgaggactggaacgctgaggctcagaaataatgcaggcatcctcagtccacctggctctggcctggacaggaatccagggaagcctgaatccgtagagccctgtatggtcacctgcctttcatgatctttggctttccacaggttactgtgtctccagaaacacatatggacctcacaaaggtgagtggagggtgtcccaggccctcactggtcctggccccatcctggggttttttcatggatctttttgccaccatccagttctttgacctaaggactcttcacaaactggaagcttgacatcctgattctagactggtggttatttgtagacgttcttattgctggcagacaatggaatgaggtgtgaaaggttgccccgcctacgtacaataatgtgtaaggttggcagtgaagctgagctgattcagggaaacacaactctcctttctttctcatgggaactcagagcagcagggcaggactcaggcctggaatggctctgagaaattgggtgttttttctggaggtgatgagaacaatgggaggtttagagaagagaacggaggttatctgacactggtctcatcaggttcactgttaatgcagcatagagaatactctgtgggtgtgatggaggcgatagaaagaccagggaggaggctactgcagtggccaaggtgagttttgatagtggcttcaccagtgtggtggctgtgaaggtagaagaagtggctggattctgggtcagaattttaattaggcctgcttgcattttcagattttgagggtaagagatactggtcaagcattactccaggcattttgaatttagcatctggaaggatggaatctccatcaaatagcatgttataggattgattttatttttattttatttatttatttgtctatttttagacagtctcactctgtcactcaggctggagtgcagtggctcgatcttggctctttgcaacctccacctcccgggttcaagcaatcctcctgcctcagcctcctgagtagttgggactacaggcacatgctaccgtgctaccatgcccagcgaatttttttttttttttttttttgtatctttagtagagacagggtttcaccatgttggccaggctggtctcaaactcctgacctcaggtgatccacctgtcttggcctcccaaagtgctgggattacaggcgtgagccaccatgcccagccaattaattttcattaaggataacaggagttttgtctttagctattatcatagtctgagatattccaaagaatgatatatggagacatcaggtgagtagctgtccatgtacatctagaattctggaagtggtttaagatggagaaatccaaaaggtggtggccagtgtttggcccagagtagctatgggtcacaattaggagtgggtaatcctggtcttgaagataatgctatttataatgcaggaaagggctgggtgtggtggctcacacctgtaatcccagcactttgggcggccgaggcaggcggatcacttgaggtcaggagttctagaccagcttggccaacatggtgaaactccgtctccactaaaaatacaaaaattagccaggcgtggtggcaggcacctgtaatcccagctactagggaggctgaggcaggagaattgcttgagcccaggaggcggaggttgcagtgagccaagatcacgccactgcactccagcctgggtgacagagtgagactccatctcaaaaacaaaacaaaaaaacagaaaagggaaggttggggctatgactgtgtctcatgcttggacacgtggtagaggtggtgagcatcacaaacagttgtgagagaaaagtggtcatgggaagattgtaggaaagaggatgatctggtgtatcagtccattttcacactgctgataaagacagcaagtctctaggaagttccagactttcccatattttcctgtcttcttctgagccctccaaactgttccaacctctgcctgttccccaattccaaaattgcttccacattttcagttatctttacagcacagccccactttactcatactgatttactgtattagtccattttcatgctgctgataaagatgtgctggagactagataatttgtaaggaaaaagaggtttaatggactcatgattccgcgtggctggggaggcctcacaatcatggtggagggtgaaaggcatgtcttgcatggcagcagacaagagagaacttgttcaggggaactccccccttataaaaccatcaaatcttgtgagacttatttactatcatgagaacagcatgggaaaggcctgcccctatggttcgattacctctcaccaggtccctcccatgacatgggaattgtgggaactacaattcaagaagagatttgggtggggacgcagccaaatcatatcatctgataagtggtcaaggcttccaaggcattagggacataagacagacatggagataaagaaataattggtagaagatgacactgaggccaggtacagtggactgtgtccccgcaaaattcatatgcttaaagcctaattccagtgtgatggtatttggaggttgggcctttgggagataattaggtcatgagggtggagccctaatgaatgggattagtgagtgctcttaaacaaagaggccagagagctactatctagtgctctttccaacaagtgaggatacaagaagtcagcagtctgcaacctggaaagagtccctaccagaacctgaccatgctggcactctgatctcaggcttcctgcctgcagatctgtgagaaataaatttctgttgttgataagccacccagtttgtggtattatgctagcaggccaaactgactaaaacactaggactagtgcttattcaccatggtaaaaactcgccaggaatttgttgtgacccttggtgagtctggggagggtgtgagtcaagcagttgaataagtttaggagtacaagtgttcatctgtatgagtcattaggttggaggtagagagccactgagagtctgtgccactgaggccactgattttgaatgagggttaagaggtgagaagaaggttgttgattgaagaggggacatcaagtgcagcacaagtggaggacggccatcggtgtctgacatcaggtgattcttggtggctgaggttgaagcaaggaacagagtcaggaagatagcccttcagagcagggtgggggctgtctatgacagtaggaaccatcagaggtctgtgtagcactggatgatgtctcaatttggcaggcagaggggtggaggtagccgtgggagtgagactgagcgagtatggttcaaagaatgatgtgtacatggagagggagtgtgaactgaaggacccaggcccctggcattgaggacttaagggtcaaaggtgaagccacatttgattgtgtctaggaggcactatctgaaagacccttggggaactgcctgacaagaagggatacactcctacataccgggcccaaagtttagatgtggtgcatcctgcccacctcctggttggtgctgtagaaggatacagtgatcattgggaccatgaaaagagagtgggcatctgtgtcaccagggcctgtatttccttaaggtggggatgattgcgtgggtggatgaacttgtggaggcgttgattgtggagtgacctgtccccatcatgacagggctgtgtgacctttgaggacatcgccatttacttctcacaggacgagtggggacttcttgatgaggctcagagactcctgtaccttgaagtgatgctggagaactttgcccttgtagcctcactgggtaaggccctaataccaactccagtgtcctggtctgtctatggtcttttgctgacttctccactttcttgggatatgtgctatgggatccagcactgtgcactgcctgagtagccctaacacctgctgcccagtggtctgggaacacctgctgcccagtggtctgggaacacctgccactgggcagcaggtgttcttcagtcagccaaatggatctctgttccttgctctcttcttggctgggtgtctgtgttcagatccatgacaccttgtgtcccaagttccctgcacccccatctgctagctgacattttcttgtggctacctgtgtcatgattgtagtcattgtcattgtctatacttatggggacaatgggctcttcttactcactccttctagtttgtttgtttgtttgtttgtttaatgatattaactttcttgcccatgggctgttgtgtgctgagtcgttctgcatcagtgctgatcactcacatgttctgtctttctggtaggacttggcttcatgaaggtcccacatagctagacaactgagggtgtgcagagaaacctggttgctttatagggtgaacatggtctcagagaaggcctgggcttgttgagtggcaactggttgggggcatgatatccgggctgttttccgatcacataaggagcctgtcctgtcttcaccactgtttgggtgcacatgccactggccaaatctcatttctatattttcttctcagtacttgacacttctctctcttattatttttatctatgacttctagcacctggctacctccacctttctgatcttcatgcatcatctgcttctctgcactgctccctctgcaatgttttccaacattgacacacacataatgtctcatgaagtatgtatatatgaccacatgaagatatgtgatcatatcacttgctactcagtttcaattgtattttcctgggcttgggcacagtcaaccttctgcacagcatgcaggtgtcaccagcagacaaggtcctcctgaagactatgtggtgagttttaggaattggaaggctactcaaggataatttttgaggctgttggtagaggaatggtttgaaggcaatgccattccctgtccttcatcccatccttgtgtcctttatttggtgaggcctccctcattctgtgatctttagagatccagtattgcaaagcaaccccttcctcaacttgcccccagctccattatcctcaaaacaaacctggtgaatcattcgtttggtatgtgtgtaatggggcttcttgctctcagcatagtcaatgtatatttcatcagcggttctctgctttcaggttgtggccatggaacagaggatgaagagacaccttctgaccagaatgtttctgtaggagtgtcacagtcaaaggcaggttcatccacacagaagactcaatcctgtgagatgtgtgtcccagtcctgaaagatattttgcatctagctgatctccctgggcagaaaccatacttggttggagaatgtacaaaccatcaccagcaccagaagcatcacagtgcaaagaaatccttgaagagggacatggacagagcctcatatgtgaagtgctgcctattctgtatgtcattgaagccctttcgcaaatgggaggttggaaaggaccttccagccatgttgcggcttctgaggtccctggtctttcctggaggcaagaaacccggcacaattactgaatgtggggaggacattcgcagtcaaaaaagtcattacaagtcaggtgaatgtgggaaggcttccaggcacaaacacactcctgtttaccatccaagagtctacactggaaaaaagctttatgagtgtagcaaatgtgggaaagccttccgtggcaagtactcacttgttcagcaccagagagtccatactggagaaaggccttgggagtgcaatgaatgtggaaaattctttagccaaacctcccacctgaatgatcatcggagaatccacaccggagaaaggccttatgagtgcagcgaatgtggaaaattatttagacaaaactccagccttgttgaccaccagaaaatacacactggagcaaggccttatgagtgtagccagtgtgggaaatcctttagccaaaaagccacccttgttaaacaccaaagagttcacactggagaaaggccttataagtgtggtgaatgtgggaattcctttagtcaaagtgccattcttaatcaacaccgaagaattcacactggagcaaagccttatgagtgtggccagtgtgggaaatcctttagtcaaaaagctaccctcattaaacaccagagagttcacactggagaaaggccttataagtgtggtgactgtgggaaatcctttagtcaaagctccatccttattcaacaccggagaattcatactggagcaaggccttatgagtgtggccagtgtggaaagtcctttagccaaaagtctggtctcattcaacaccaagtggttcacactggagaaaggccttatgagtgcaacaaatgtgggaattcctttagccaatgctccagcctcatacatcaccaaaaatgtcataacacatagaggcctcatgaatgcagcaaatgtggaagcgccttcaactcaagatctatcatcatttagctcctgaaagtccacacttaagtagagccttagacctacagggaaagtgctgtctctgtagtattgtagcagtagagagcctttgtgagggagccatctgcctgaagttgaacctcattcttccttgtttctctggtagaaaccatctaccctctaccaccttgcacagtgggcactggtcactcctatgtgctaagacaaggcagacatctgtgtgttctcttaagtctttggaggaaatcttgagcagtctaagcctttagagaaaattcattcttttttctgactgatcacagcatacgtgtgacccagtttgggtcaggagggcccagccttggttctgctggacacttatgtgcaaggattcccttcatgtaaattcttggtctcacatgacacttggtcattcttccagcctccatgtcaccacgtggtgaatggctgcctcacattgctccagtttgtgcactaataaaagccttatatttgaatctacctgtagtcttggggttctgtttactgtgtggggtggctgggagacagacttcaactctatatgaaggaatggatggcttttgtgggcctctgcaggaaagtaagatgacagagtaattctaattctggttttggtcatacttgctttgctacctaaaatctcctaggaaaaaatgcaaggttttggttattctaatttgtggcctggatccctattctttctgtgagactagaggtcatcctgaggagaggccagctgttatgacaagcatgtgtgcttcagggaataggacaattttattccattgtttccagaggatgtcatatgatgcccagtgctgctgagaagcttttcatggggttctataaggaggcatgccctgatatcaaacattccataggccgatgtcacgcagaagacaacgcgagtcacatgtgaactgtaattggtacagaaatacctgggtatttctgtactgtgtgtactgtagcaaactagttggaatgtgcctcttataaaagtacatttacaaatcttcccgtgactgtggctttgagcagtcataggacctagaaatctgtgtatgtccaatagctgaggttattttcagcaaaaataattaaagggttttattttttaattcttgttggttttctaggttgttcacctcaagtgcattgctgtagaggcagaaaaaggaggataaagataacagaagtcctataggccagggatgtattgatagctcttgtgatttccaccagtgttgctgttgtctcaaattgccacagccttcattgcttgccaacatttcctgcatggagggactcatggttgcccttccccaggcctgaagagagagtgcagtcaacatgagattgctaggcattctggtttctgaaagttgggtgatcagatactttattgtgaaacatgttttacaaactttcttgatgtgtaagtgacatgccatagtttacatccatttatggtgtataatttgaagagtttgtcatacaagcctgtgaaaccataatcatgatcatgaacatattcatgattcacctcttgctgttttacaatctctgcgtgtactttccaggccttcaggagtcctgtcatttactttccctacaggagaatagtttgtgttttctaggattttatgtgaattgaaacgtaaaatacttactccatttttcctgatgatgcacaattttttttttttttttgagatggagtctcagtctgtcaccaggctggagtgcagtggcatgatcttggctcactccaacctcctcctgggttccagcgattctcctgcctcagcctcctgagaagctaggactacaggcatgcactaccacgcccaactaatttttgtatttttagtagagatgtggttttaccatgtttgccaggatggtcttgatctcttgacctcgtgatccgcccgcctcagcctcccgaagtgctgggattacaggcgtaagccaccacaccagctgatgcacaattacttttaagatttatcaatattgcttatgtgaatagttcatttgtattgctgagaaatagtctgtggatatgtcacaatttggataaacagttggatgctttccagttttgggctgttgcaaataatgctactatgaacataggcatataactcttaatatgcagaaatgctttatttctcctgtgtcagtagtacagtgtacgtgaatgcgtcacttttaaagacaaggccagactataacctaactgtaccatttgcattctcatcaacagtatgtgaaccttcttatttctctacattcttgccatacttggtatggttagtctttttaattttagttgttttaatagctgtataatagcatctgtctgtgattttattgcatttttctggtattttatggtattgaacatttgaacatcttgtatctagttgccacctgtatatcctctttggaagaatgtttattaatgtcttttgcttatttttaaatggatgttggtgatactttttcattaataaatagacgtataacaaagacttatgttgaaactttactcattcttcagtaatgtgatgcacttatttgctaaatgataaaattgttttcaaatactgggaaaataatttctcagttttttggtctattcacagtgtaacaactacagacactatatacctgaaacactaccttcattgacaaattctccatcactttcttaggtctaaccattcaatgaaacaaataagccctggtttttaatatttgccaatttccctggtaaaatactcccaccatggccaattacaaggtgtcaaaataatgtcactgaacatgaattgagaagaagtgggtagcgtcacaccactgtattctactttcaccatgccaatacagtagccgcagataacctgaagatcatgtatgtaggaaccatacagcctgtggtgtggcaagactgatgccatcttgaagtgaagctgtcatggtcacctatgttctgaagcagtagcatagatatcatcaaaatgcttctctcccccaatggtcatgagtcttggcaagaaagtctgaagacgtgaagagctgcacgttttaccctaaaaactccaggccgggcgtgttggctcttgcctgtaatcccaacactttgggaggccaaggtgggcagatcacgaggtcaggagatggagaccatcctggctaacatggtgaaaccccatctctactaaaaatagaaaaattagccggttgtggtggcttacgggtgcctgtaatcccagctacttgggaggctgaggcaggagaatcacttgaatccaggaggtggaggttgcagtgagccgagatcacgccattgcactccagcctggcaacagagcaagactccgtctagaaaaacaaacaaacaaaaaactccagccttgttgaccactacaaaaagggtcctataaaggatgtaaaggaaactgccttctggagggcagatacagggatccattgtctcacagctgcacaagacatcacttctgttcatgagtccctatgaaatgtttctgaaaacaatttggcctcttcctccttctttggcctttcagcttcgttggcctttgggatagattttcatacacctgctcactatagaacaatgtatatataagagtaaaacagtaaaatgattaagaattgacttttgagtatttattacttgtgtttttaaaagtggcttaagtgaaatctagttgtcttaaattctgcatatttaaagtatacaatttctattttaatatatactcgaaaccataagtttccacctgccctttttagtccatccctcttaacaagtaatgggtacaaaaacttatttttcctcttctaatggatattttcaagtatatacacaaatggaaaggactgtgttcagatgcactatgaaacctttctaaatcttccattattacttatcatttagtagccattcttgtttcaactcttttcacacataattattttacttacaattcccacatcttgtcattcaatgctgcacctcttcagaatgcattttcaagcataagagctctttcataattcctataactttatcaatcattatttaaggcatcataaaatatatcatcagtgctcagtcacctcgaattgtctccaaaattgatttttaagacaaattcattgcaatcagatccaaaatgaatctatatggctattagtagtttcatctggtgagtctataataatacacagctaccactttttattattattcttgaagttgatgagacatttgtccagaatttgccacattctggaatggtgcgtgtttttgttttgtgtctctctgatgtcatttaacatgctgaccctttctccatattcctgtgcactagatattaaggaaatgggtaactgaactctggtcctgcagataggtgtgcaatagtaacacacttatgcagtgtgactgtgttgtgtgtatgtgtatgtctattcaaaaggtgacattcacagacatctggaggcttagagattattgaaaaagtaaaaaaggaagaagcactttgtttttgcttcctctaagatacctgagaaggtttctcaactgatttgaaatgtgaaacaatgccaaaacaattaccatagatccagtaatactgcttcttggttttactgaaatgagttaaacatttatgtccacacaaaatcttgtacatgaatatttatagcacctttgttcataattggcaaaatttggtagcaaccaaaatgtccttcagtaagtgaacaggtaagtgtggtacatttagaaaatggtatatttatccacattaaaataaataataaaagatatggaagaacttaaatacatatttctaagtgaaaggatctgatatggtttggctgtgtccccactcaaatctcatcttgaattataagtaccacatgtcatgggaggaacccagtgggaggtgattgaattataggagtgggtttttcccacgctgttctcatgacagtaaattagtctcacgagatctgatggctttaaaatcgggagtttagctgcacaagcttattctctttgcctgctgccatccacctaggacgtgacttgctcctccttgccttctgcaataattgtgaggcttccccagccacgtggaattgtgagttctccattaaaccgctttcctttgtaaattgcccagtctcgggtatgtctttatcagcagcgcgaaaacggactattacaggatccaaactaaaaggactacatactgtgatttgaactatatgacattccagaaaaagcaaaactatggagacagtaaaaaatgagtggttgccaggggtttgggggaagggaggaagggatgaacaggtggagcacggaggacttttagggcagtgaaactactctgtgatactaccgtggtgtgtatacaagtcactatgcctttgtcaaaacccatataacaaccagctagagtaaatcctaatgtaaactatggatttgggatgataatgatatgccagcgtaccatcaattgtaacaaatatactattctagtggggaatatttatagtggagtggctgtacatgcatgggacaagggatatgtggaagctctataattttttgctcaattttcctatgaaccaaaactgctctaaaaaataatctattaaaactttaccagcctgagcaacatggcgagaccccgtgcctacaaaaaatcaaaaaattatcagggcatggtggtgcaggtgcatgtctgttaccagctattctggaggctgaggtgggagtattgcttgagcccaggaattcaaagctacagtgagctctgattgtgccactgcactccagcctggatgacagagtgagaccctgtctctaaaaaaattaaaattaactaatttgcaaattagtttaaaatatgtattttgcaatgtttgtgctgtgtatttgtataactcaagggagattaattttaacaaattgaatttggcaagccagttatttccatgagcagcctagttaatttatctacttaaacaacaaaaacaagtagatacacagattttctggcactttccaagctcactatttccctactttgactattggcctaagaaattgccataagagctgtgtgtacctgtagccccagctacttgggaggctgaggcggaaggatcacttgagaccaggagttttaaaccagcctgggcaacatagcaagaaccctgtctgtaaaaaaaaaatatatatatattttaaaaattagctgggcacagtagtgagtgcctgcaatcccatatactcaggaagctgacacagaaatgtcgctgaagccgaagagtttgaggctgcagtaatctatgatcctgccactgcactccagcctgggcaacagagcaagactcttcctcaaaaaaaaaaaattaccattagacactcaaatatgcaggcaaaatgagtcctttgtggagtcactcagaagggctccccacttacctttctatatgaaatcatgctggagccacaccttctccctttccttttcagacaggacttaaattcagcaactgaagagctatctgctctatgtgtcttcagggtaaacatttccagagccaagccaaatgtacttatagacttatatatgactgcactaaaaaaagcaaagtaagtctatgttcagttcaattaattatgttcaatattctttttttttttctctctactgagatggagtctcactctgtcaccaggcaggagtgcagtggtgtgatctcggctcactgcaacctccacctcctgggttcaagcgcttctcctgcctcagcctcccaagtagctgggactacaggcgcacgccaccacacccagctaatttttgtatttttagtagagacagggcttcaccatgttggccaggctggtcttgatctcttgacctcatgagccacctgccttggcctcctaaagtgctgggattacaggcatgagccaccgcgcttggcctagccacaagattattaatagttgtgacgtataatgttttgtgtcgacttgcctgcattaagggctacccaaatagttgggaaaaccttagtacaggatatgtctgtgagaatgtttatggaagatattagcagttgagtctgtagacaatgtaaaggagatctggcctcatcagtgttaggggccaacatccaatgctttgagagccaagatagaacaaaaaggcagagaaagagcaagttactctcttcttgccctggatcatccaccttctgttttccaacattaaagttcttggatcttgggcctttggactctggaacatacaagaatgaccctcacccagttctcaggccttcagcctccaactgggaatttcaccataggctcccttggttttcaggccttcagatgcagactgaatgataccacccaccttcgtgtcttaccaggttgcaaaaggtatatcctgggacttcttagcctccataactggatgagccaagtcccataataaatcccctcttgtacatctatgtatcctattggttctgtgtttctctggagaatcctgactaatacaataggtttcagtaattttcatttcacaactgtttttctaagatgatctcaactccccatgcaagcactgtccctgcagtaacagtatcaatgatcaaaatttcccatcaaagagatgaaagctaggtgtcccaaacctttattctggtattctgatgtcccctttgcacaagtgctctgactgtgaacactacagacactgttctactttaaaatggcatatgctaagtggctcttctgtttagaaagttgctacaatcctaaaagaagcatatctaagaatatggaggaagaaatattatatgaatacaacactgttccttacagggctagacacactcaccgattacacaggcaggagaggcattttctgtgagacaaaattcctctttcgtcctccagcttcggtgcgatctaacggatgttttatcattcctgtcatggcgctatgtaaactctatttcccttattccttactgagcataatgaaactcacaaagctgactctaacgttctactttacataaatgtgtggagaaagaaggtaatgtttactaggctctcgccaagggtagaggcattttgtatctgaataactctgactacctaggtgactagttgtacacaataccctccaaaaatctctgtatggtaccttaaaaaagcagcgaagctcctcccttgtccaaggaggctggagacaccacctctcagccttcccctccacctttctccatagcaacggggtcattcctccctgaggtccaggagaagggcgacctctgccagcccaagaagcggtgagaactacattacccagaggcccgtgagccaggttcttggcgtggagccaatgaggctcaggggagggacatttccgctctgtccaacttgtcggagcggaacttccggcgtcctccctgtggcgggcactttggcttgtgtcagttccatccgcgggtgccggatctggacctaggtgctgacagcgagaaggcgcgaggagagtcgttttctcagctgcacagccggggcctgacggtcgccggcggtggtgacagctttgctcttgtctccgcccggatcgtccaccgctcccggcccgctccgcccagagtccgatggcggcggcactgagggccccgacccaggtgagcgctgcgtcctcccggcctcctctgccctccccacccgaaactgagggacgcgtgaagggttttctgcagcccggaccgcactgtccggcacagtgaggcgctggtgctggatctcgtttctggtagtgtggcagggagcgggagagcgacacggtcagggggctgcgcgggcaacagcttggagctgcgcctgagccgggaggctggggagacccaggccggcctcacgcgtgcaggtagcagagggtggggcagcgccgcgctgcattggccccactgagtttcaccagcacactgagggccacagcgcgtaggacagaagaggggcacggccccagtcacgcttctaaaagtttcacaaaagctgttcagaggaacgcgctggaagggcagtgatgatagcaggcatggagggacctagtctttttacgaggtcacaaagctggtaaaagtcagcaccaaggactgacacccagatacaaagcagtcatccctggacacctggctctggtgttccacattggaaccagaagtccatggagccacactttggtcacctgcctctcagaacatgtttcctcccacagattgccactagtacttacaggtccgtaagaagcacttgaagaccctacaagggtaagtggaggaaatccagaagctcattgattccagcaatgggatctctaggattgggactgtggtgacctgggattctttacttaccgcttttccaggccttgagcctagggactctgaacaaaaatatgtccagggtgagtattatatgaggtggtgcctgttgctggcaaataataggatgaatgtggaagtttgtcccagagataagtacaggtgtttggagctgcttggaggtgaggctgagctggttaagagaacctcaagtctcatttccttctcatgggaacagagagcagaggtacaggagttagaaactaaatggctgtctcagatgtctttgttctggagatgatggcagcaatgaagatttggagcagaagagggaggtgatcttccccaggcctcatgaggctcctgtggctgagcacagacaacagactgtgggtttaagggagttggtagcaataccaaagaggaaagaggagactactgcaatagtccaggtgagtgtagatgatgtgggccagagtagtggccacagtgtggcagaaatggttgaattttggattgtaggtcggctctgattttctggtattgggactgagagataagaaggggtgactcaaggctttttgagtttagtagctggaagcatagaagctccatctactgggagagccaagtagatagtagaattgtttttcactcaggacatcaggaatgtgttttgtccatgttaaaaatatgagatgttttagagaataagtaagtagctatatcaagtggctaggtggacacacaggtcttggactctgaggaagggtgcaggatagagacttctacaaagagtggaggatattattgaactaggatggagccctatgtctgttaggccatttgcattactataaagaaatacctaaggctgggtagtttataaagaaacaaggtttattacagcttatagttctgcaggctgtacaggaagcttagcgctagtctccacttctggtgagggcctcaggaagcttccaatcattgcagaaggcaaaaagggagccagcaaggcaggagggaggcaccagtctctttttagcaaccaggtctcatgtgaacttattactgttggaaggatactatgccattcatgagggatccacctccatgacccagataacctcccactaggccccacttccaacattggggatcacatttccaggtgagatttgaaggggacaaatatccaggctatatcagtgtcttaccttgggttgataatgaaataacctatattggtggcttaaacaacaaaaatttgtttctcacagttctgcaggctaggaaattctacatcagggtgcctctagattcacttatttgtgatgggctgcttcttgacttgcagtggctgccctcttgctttttcctcacatggcctttcctgggagggagtatgtaaagaaagcaaggaatctctttctttctattcttacaaaagcattaattccatcatgagggccccactcttttgaccttatctaaatctaattaccacccaaagattccatctccaaatactatcacattatattaggcttcattgtgttagtgcttcaatgtaagcattttgtgggtgggcgtggggcagaaacattaagcccataacatcatagatcccatttagtagtgggattcctggtcatgatgataatattaatagcaggccaggaaggggaagggtgggagccacaagagggtaccatacttgggtatctggatggatgttgtggaaatcacaaatacaggttatagagggaagcagccctaggaataatacagagagaggataccaggcaggtggccaagggttatgaaggatgagtgaatataagatggatgtggaggctgcattagtccattttcgtgctgctgataaagacatacctgagactgggaagaaaaagagggttaatggacttgcagttccacatggctggggaggcctcacaatcatggtggaaggcaaggaagagcaagtcacatcttacatggatggcagcaggcaaaaagagagtttgtgcaggggaactcctctttttaaaaccatcagttcttctttttttgagatggagtcttgctctgttccccaggctggagggcagtggtgagatctcagctccctacagcctccacctcccagactcaagggattctcctgtctcagcctcccaagtagctgggattacaggcatccaccaccacacccagctaattttcgtatttttagtagagacggggtttcaccacattggccaggctggtctcaagctcctgatcaagtgatccacccgccttggcctcccaaagtgctgggattagaggcgtgagccactgcaaccagccttaaaaccatcagttctcgtgagacttattcactattgcgagaacagcacaagaaagacccacccccatgattcaggtacctcctactggatccctcccatgacacatgggaattgtgggagttacaattcaagatgagatttgggtggagacacagccaaaccatattagagacataatgggatttcagacaagatgaggctgaagccagacctaatgctttactgctatatagcctcaccaggatcttatgactggctcctatgcctagggagtttcatgcaggctggtggatcagtttaggggcagaagtagtcatctgggagcatcacttaaccttgggtggagggccaccaggcaaggttttgaatgaagggtagcaagacagttactgttactgttactgtttagtgcagttactgtttagtgcagtacaagttggaaagggccatgtgtatctgagatatgtatgtggttctgggtggctgaggttgatgaaaggagtagactcaggtaggaagggcttcagagcaggatatggggctgcctgtggcagtagggaccatcataggtctgggtagtcctggaacttgtttgaatttgcaagcactttctagatgtcttgtgctgagtaacatataggaaggcaggagagatgcctgtgttgtgggatcggggtggaggtggctgagggagtgagttgggtaagagaggtgtggtggaaagagtgatgcacatatgaagacggagtgtgagcttttgtttcatgagtctggacattgaggacatgagggtgaaatgtgaacccagaccttcagttgtgtttgggagccatggtctgagggattccaggagaatttatagacacaagaatgtggtttctatctgtccacctgcctgttgttgctgtgggagaacacagtgaccaatgagaccatgagagagtaggcatcagtggcatcagggcctgttgtattcgctgaggtggggagatggggaggagggtgagccagggatggatgtttgggggaatcaacttggggtcctaggaaagatgctgaccatggaatgaactgtccccatcatagcaggtttttgtagcctttgaggatgtggccatttacttctcccaggaggagtgggagctccttgatgagatgcagaggctcctgtaccgcgatgtgatgctggagaactttgcagttatggcatccctaggtaaggccctcctattcctcccagtttcctttgtgggtctctccttttcccctgtccctgaggcagctctgtcctttcttcagttagaccctgagctctacagaccttcccactttcttggcatatgtattctgagggacatcgccaagcaaggcactctcagactgtcctaacacctgtttcctctaggtatgcagtgaagggtctgggagacaggatctttctttcaacctaaaggatttgtccttgccttctccatgacaggatggctttctccagttctaggatgctctttgttccatgttctgccttttgcttctaactaaaatctcaagctgcctgtttcaggaattgcaggtatcatcatgttaactacttaactggtccataggcttttcataaagatccacctgaaagattttcttgtaacattatttttcactgctgtagtttgtcatgtgctgagttgctctgtgccagtgctggctgtgcacctctctggtcttccctttagggcatacatcttataggtctggtatagttgcacaactgggattcgaggatggctctggttgctttacagggtgcaaacagcaagatagtctcagaggaggcctggccctaatgagtgacaactaagggagggcaagacactagggctgtttctaatcacaccataaacctgtcctgagttctcagtgattgggtgctgattccataggacatatatcatttctctcttttttttcttttctacacatgttctgatttttatttcatccatgacttccagcccttagctgctaccaatttctggcctccatgtgtcacctgttcctttccagtgcaacttctagagtgttctctaacactgacccacatgtaatatgttgtcagatgtgcacatgtttttaaatagtccttccacacctagtattcagttcccatgggtgtctactgggcctggacaccaataatcttctgtgcagtgtaccgaagtcctctcttctcatcaggggaggaagtcctgataaaagcttttggcagaatagtgagtcagagaccctacctgttctctctgagttgtgccccatctttgtgtctttcatctcataaggcctcccttgttctgtgacttgtagaggcttttttccacaaatttccaccagctctcatatcctaaaaacattttcttagactcattctttgacacacatttttgatgtaacttctcacaccatagtaaatctgtgttttctcagcatttctcttctttcaggttgctggtgtggagcagtagatgaggggacgccttctgcagagagcgtttctgtggaagaactgtcacagggcaggactccaaaggcagatacatccactgataagagtcacccctgtgagatttgtaccccagtcctgagagacattttacaaatgattgagctccatgcctcaccctgtggacagaaattgtacttgggtggagcatcaagagatttctggatgagttcaaaccttcaccagctccagaagcttgataatggagagaagctctttaaagtggatggggaccaggcctcatttatgatgaactgcaggttccatgtgtcaggaaaacccttcacgtttggggaagtcgggagggacttttcagccacctcaggacttctccagcatcaggtgactcccaccattgagagaccacacagcaggattagacacttgagagttcccactggacgaaagcctctcaaatacactgaatccaggaaatcttttagagagaaatctgtattcattcaacaccaaagagctgactctggagaaaggccttacaagtgcagtgaatgtgggaaatcctttagtcaaagttctggctttcttcgacacaggaaagcacacggtagaacaaggactcatgaatgtagtgaatgtgggaaatcatttagtcgcaaaactcacctaactcaacaccaaagagttcacactggagaaaggccttatgactgcagtgaatgtggcaaatcctttcgccaggtatctgtcctcattcaacatcaacgagttcacactggagaaaggccttatgagtgcagtgaatgtgggaaatcttttagccacagcactaacctctatcgtcacaggagtgcccacactagcacaaggccttatgagtgcagtgaatgtggaaaatcctttagccatagcactaacctctttcgacactggagagttcacactggagtaaggccttatgagtgtagtgaatgtgggaaagcatttagttgcaatatctaccttattcaccaccaaagatttcacactggagaaagaccttatgtgtgcagtgaatgtgggaaatcatttggccagaaatctgtcctcattcaacaccaaagagttcacactggagaaaggccttatgagtgcagtgaatgtgggaaagtttttagccaaagctctggcctctttcgacacagaagagctcacactaaaacaaagccttatgagtgcagtgaatgtgaaaaatcatttagttgcaaaactgacctcattcgacaccagacagttcacactggagaaaggccttatgagtgcagtgtatgtgggaaatcttttatccgaaaaacccacctcattcgacaccagactgttcacactaatgaaaggccttatgagtgcgatgaatgtgggaaatcctatagccaaagctctgccctccttcagcataggagagttcacactggagaaaggccttatgagtgcagagaatgtgggaaatcttttacccgcaaaaatcacctcattcaacacaagacagttcacactggagaaaggccttatgaatgcagtgaatgtggaaaatcctttagccaaagctctggcctcttaagacacagaagagttcatgtgcagtgaatgtgggaaattattttgtcacttttttttttttttttgagatggaattttgctcgtcacccaggctggagtgcaattgtgcaatctcagctcactgcaacctccgcctcctgggatcaagtgattctcctgccacagcctcctgagtacctgagattacaggcacccaccaccatgcccagctaatttttgtatttttaatagaaacaaggtttcaccatgttggtcaggctggtgttgaactcctgacctcaggtaatccacctgcttcagcctaccaaagtgctgggattacaggcgtgagccaccatgtccggcttgtgttgtgacatttaacacaagatttcccaaagaagaaaggccttatatatgctgtgaatgtgtttttgcttgttagtttgttttaacttggtatgacggcactggaggctagcctttgagaagagccttctctgatgtgactcatgtatccaaacatccatggatttcccataaatttgaggtatgtgggaagcatgtgtagctatgttgtactctctaaacctgcccagggaccttaccagattcgtgtcactgccagtttctgcggctgaagccttttcatcactacccgctgggagacccacagagtgtgcatcagtcaccaccccaacatgctcagggaggcagagttcttccattagttggaggaaagcacgagtagtctaagctcttaggggggtttctcatttcctcctgtggctacatagtgcatataactaccccagtgttggccccaggacctgatctgagttctgctggcagcttccagaggattgccttttttgaggacattgttgatctcaggcgatgcttgtgatgaagcattttttagcttccaccacttaccaggaactgcctgttaactggcttgtgcaatgataaaggccttttgtttaagtacctttaatcttgtaagttgtattaattgttgagtagtttggaaacataataggactctgtcagcttaaaagggtatataacatttgtggggattcaaattttgtttgcctcagaggggacagtatgctcacagaatatagattttgctccatttttggcctatttcgcattgtttccaaggccttctaggagacactgcagggctttctggctctgatttttgcctgcatgtgggctcagaggtcattctgcagagggggcagttgtggcaacttccattgtttctggagacaacacaaagtttttcttgttgagtgaggatatcacataatgccctgcaatgtttagaatcccttaatgaggtcctgtgaaggagctgtgtcccttgaaacacagaattcagtgagctagtgtccctagctataaaaccatggggctggagcgaaacataattggtaaagaaacgctgggttgaataatagggaatggaggagactgcagcaaattagatggactgttcctcatataaagtttcatccggccgggcgcagtggctcacacctttaatcctagcactttgggaggctgaggtgggtggatcacaaggtcgggagttcaataacagcctggccaaggtggtgaaaccctggaaggctgaggcagataattgcttgaacttgggaggcagaggttgcagtgagctcagatcacaccactgcactccagcctgggtgacagagcgagactgcgtctcaaaaaaaaaaaaaaaaagatccattcaggccagtcacagtggctcatgcgtgtaatccctacactttccgaggccatggcgtgcagatcacttgaggtcaggagtcagagaccagactggccaacatggtgaaaccccatctctactgaaaatacaaaaattaaccaggtgcagtggtgcacgtctataatcccagctgctctgaaggctgacgcaccaagaatagcttgaacccggaagtggaggttgcagtgagctgagaccacaccactgcactccagcccgggtgatggagtgagactctgtttccaaaaaaaaaaaggctgggcgtggtggctcacgcctgtaatcccagcactttaggaggccgaggtgggtggataacccaaggtcaggagttcgagaccagcctggtcaacatggcgaaaccctgtctctactaaaagtacaaaaattgtaaaagtaaaaagtaaaagtaaaagctgggtgtggtggcaggcaccagtaatcctagctactcaggagacaggcagaagaatctcttgaacctgggaggtgagccgagatcgcaccattgcacttcggcctgggcaacaacagcgaaactctgtctcaaaaaaaaagtatccacaaatgttccagtgactatgactgcaagatcactgtgtgcagaaatctctagaaatgtgtgtcttgtagctcaagttattactagagacaacaagggttttgtggattcctgtagcctctctggcctgtttacttcaaggccattgctgcacagacaaaaaaaaaaaaggatgaagtcaagagagattcggttgtccttggtgcggcttttgtgatccagtagcaatcctcttaacgctgatggaaatggccttcattgctcacctgtatttcctgccactgaagcaggtctgcctctacgtggcctggggagctagatggtagagtcaatagagacttagtaaaccagactttttgaagtgtcaatgaccaagattgttattgcatccattaaaaaaaaatcaagttataattgatgtggaataaattatatatatttaaagtgtacaacttgataagttctgacataaatgtaaacccatggaagcattgttgtaatcataagaatgagcatatctcacctgcatattttacttttgctcttttataatacattccagaatatgcaggcaacttttaacattcctttacaattgattgacttgaattttctggaattttattttagacatcataaagtgtgtatttttttgtgcttttatttataaaacttccccttaggtaagggcctgaggttaactttggaggtgacagatatgtccaacaccattgatagggtgatgatttcaaaagtgtacatatgtgtgtgtgtgtgtgtgtgtgtgtgtgtgtgtgtgtatacttactgttttaatatgtgcagtacattgcatgttgattacacctcaatgaacctataaaaagttattccatttaaaaatctgggcctcccacttctattggaaactggacaacttgacagcctgcagtgttttgaaacagcatggattgggtgtcttgtttccagcatatgtcccatgttccccaacactgttcctcaggaaacagggaggaacagctgttcctcaggacctgctgagtggccatattccctgaaggccagaaaagtaacaaggtgaccgttttggacaaaattctgagcttaaaaccttgcctgaatcagtagcccccaaattcattgtgcacatcttataatttccaagaacacacatattaagtgaatatttttatgtttataattgtgaaatggtctgttcagggctgtcattcctcaaccttttttttcaaccaccctctcattaaggaagcatatgtattaatcatggtttctgttttttgtattatatgtcttgacatcttaaaattcttgctggtgacagagagacttaccctaccagaggtagctaatttctaaaaatagtaaacaactaccttgagagcaaggcaagccaactaccctctttatctaactcttactcaccaagccaatactttccctgcactaaatcatcccagcgttactgccagtgattttgcagcagtctgcagcaattttggtccttgcctcctcagaagaaaattcaaccgaggaggcagaggttggcttaaggcacaggaagagaccaaggcaagttttttttagcaggagtgagagtttattaaaatgttttagagtaggagtgaaaggaatcaaagtacacttggaaaagggccaagtggataacttgagaggtcaagtgccccacttgatccttggcttgggactttatacatttgcttatttcccaggctctttattctccttccttcggtaggctgttgcttgactactgcatgcacagtggtctgccagtacttgggaggggccgcatgcagtttgtttactgaagtcatacatatactcatttggggtgatcttcccttaacaagtcatgcacccccagaggaaggtcaaataccagtcaaattttgccatcttgccccattttgtgcatgctcgaaaccttatcaggggttgtggttcactggctccaggtgttttctatctgttggaaaactcttttccctcctggtaccaatcatggccacttatcatctcagagggatagttttatgctttcctgtccttcacccaatgagagctggacatctcgggggtccctctcttgttttgtttattatctcagaggaaaagatttatgattgcctgtccttgactccaaaattgcctgacattcctggggtccctctctcctgccctactcttatctacctactctaacaccagggtgagggtatgaggcaactagagaccacccctgtaaatcgaagccaaccagaattattcagactagccagtactcagctgtttgctctgatctggcctaggctttcccctagctcttgcttcttcctttagactgaaacctgttcctcctgtggccctgcatggcatactgtacttcccatttctagggaaattctgagtaacattaaacttttatttcactggcattgagctctccatgtccttttccaataaagacccatccacaaattggcctctcttggctatgtaatattacatatctttccagcacttctcaatgccttcaccttctcttttctccattatgcctgccacattctaacattccatataatttagcatttttttcatatttcctcctctttcttgagtacagcgtaagctattggggtctgtctcttgttttgtaaatgtcccatgcagttaagatagtgtctgaaatacagtaggtgttccttgaatatttcttagaactatgaataagcataatactacagcatccctgttcaccttaatattctgatagcactttctaaatgttttctttacttctccttccaggtattattgagtgttttcaagaatgaaaagaggcctggcatggtggctcacatctgtaatcccaactttttgggaggctgaggtgggaggatcccttgagcccaagagtttgaggctgcagcaagctatgatcgtgccactacactccagcctgtgcaacacagtgagatcctgtctccaaaattaaataaataaataaaattacattttggagactaaacgctgcttgtagtcatagttctaacacagctgtgtgctcagcttcatttgctcacttctcagaattcaatgtctcctgctcaaattttgctgtcatcttaaccgttttcacttatcacagatatgtttctccaggtccatttcgtcatgtatctgtgaataactacagaattattaactttgagtaatttggccgggcgcgggggctctcctgtaatcccagcactttgggaggctgaggcgggcagatcacgaggtcaggagatcgagaccatcctggctaacacggtgaaaccccatctctactaaaaatacaaaaagttagccgggcatggtggcaggcgcctgtaatcccagctactccggaggctgaggcaggagaatagtgtgaacctgggaggcggagcctgcagtgagctatggtcgcaccactgcactccagcctgggcgactgagcaagactccgtctcaaaaaaaaaaaacacaaaacaacttttgagtaatttaaacaattcacaaatgtttttgtctttctttccccatacactcgcccttttcttttttaaaaccataaataaatctcaattctcaattcagacactgtcggtgtaattgcaggtgaaatgagaatcacctcccagccaagaaatctgatcccaattttccaaatctttatttctgggttcagacaccacattttcagcccctgtcttggcatataaaagcatttataatggttcttcttttcagataagaaacatcaccaaaaggaaatagatatatctcaacttttgggctaggaactctcatttggataaaagaatatttctcctttggttggacattagtgaccatacaggcaggaaaggtgccttccttgaccaccttctctcgcctgtcttcctcctcatggttctctcaggtattttttttctgaggaaaccagaggaagagctctatattagtccacttgcctcagggagctccagcatccctccatagccactgtctggagaccattcttccactccatggccctgcctggggacaattctctgttaactctgacccaactgaggctcacaaaactgactcaaagcttccctctacagtacacatattttttaaatgaaggaaatttgactgaactatgagtggactcagagtgacattggatgttgtgtgtccatttggtggtgtggcttcagggaacatctgtaagaatatatcccaatatttcggggatccctgcagacctcactacacaagacctggttgagggtcctttaaaaggagcgaagccacgccctgacctcagagtctcagggcataatttctcagcgcccctcgcagtaccatttggcctttgcccagcgtgcaggggagttagccgtcaccacggccaagtgcacatgagaactgcattgcccagaaacctgtgcgccgcccggcggcggcactcttaggggcgtctccctgcggacggaagctctctgggcgggacttccggtatcttcctcgcggtggacatcttgtcggctcttaggtggaaccatcggagcagaagctcggggttgctgggcggttccgaggtgacggaagcgggagggtgcgggagaagtcgctgttcgctctgcggagtggctcgccagcgaagaccccgcctgcgcccccggggacggacgaccgcggtgccagggtcccgcgacctgggaccccctcgcggctccgggtggtctacgaactgtgatggcggcggccgcggtgatgggcccggcgcaggtgggtgctgcctttcccagactttcgcccgccccaaatcctgaagttccaaatgaggagcgcctgtctgagtccctgcagcgcaggccccagtgtccaaggcagcggggcgctggtgggtgggggcgagtgtgactggcagaggggcagcctgagcataggtttggagctggactgagcccgtagcagtcgggagcgtgtgtgaaccgtagtcaggcctgcaatgtcgaggggagaagttgctccttcattgcgaggacgataggagccatggcgggttttgaatggtggagggaagggatccgaaaaaggatttttaaagtattccaatgtttgctgaggaggaaaccgactacagtgaggtagaaacgatgaggatggaggcaaggagacgtttgaggaggtccctgcaacaaactccagaagtgttgcggtggtggctgggccagagcagtggcaggaggggttgggtggggaagtcatgagattctgggtagatttttaaagatggaaccaatggggtttcctgccgcatcagatgtggtcgtgagtgaatgtagggaggaaagggctatccagggtttttttggcctgttttccttcctgaacgtgtgaaagaatggaaattggtaagtcacagcagggagcacgtttcaggggcatcaggaattgggttttggacttggtgaatctaaggtgttctgcactggaggttcatcacgggtagctgaacatgcaggtctggggttctagagagggagttgtgctagagacttcaatgggtgaggcataaggtcaaagcctgtagtagatcagatttagagggtggaatttcaaggaagttattttgtgtggtctctgaagtgagaggtgggtttagggtggaaggccagggatgaaggggtggacacttaagattccttccagaaaggaggggtcctggcatgtgaaagcattctagatggtgttgttggaagtcaatgcttggtgctgcaaagtgaaaccagcactcaggcaaaagttttctcagcaaggcaatttacttctgtgcaagtgtgctgcctgtgttaatcacgatcccaagagcacactgaacaaaggagggaaggggtttttatctctaacccatagtccctaccttcctctgtgtcactcccccatgggctggggtcggaccgcttaatctaagctgagccaattgggtatttgtgagtattttccaaataaggaagagggaaggggaaggtgagttacagtggtgggacatgtgagttgtgtaggacgtgtggttttggcgggggcaatgggtgcaaagtgagtaagggaacagatgtgaattattggttagtgcttacaggaaggttgtttatagtaactaggggcaaggaggcatggagaacaagaaaggtttgagaacaaagaacaaggaagttaacaggctaaacctttgaagaggaattttattatatcttatagtgtcagcaagaggagagggctgtagagcataagtagcctggcctgcactggagaccaaggtgagggatgcagtaggtttgccaccctacaggctcagcatgccttcatgggcgctgcctgtggagcagtcccatccccaaccagtgcattggtgcctcagttacccaaaccctcaggtaagcagaattgatgaacatctctaatgaaggatcactgcagctccccttcagaggaatatgtatcaggtaggctggtttagtgcaagggctagtgtacaccttgcaagtacgcagaaggaactaaaaaatgtatgtacaaagtaagggaaatttatactagcacttaatgattggtcaaaatattaagttgccttgaagtattttattacaatggaaaaatcttaaccaaattttcttaaaagctttaaagcaggcaaaacaaacctaatttttcaaaaactcatcagttcatttgcatggatagtagtagctgtttcaaaggcacttgagatgtacagacaagcctgatacaaacagtagccctatgaggtgggtgccattattatccccacttttaagatgaggacactcagacgctggtctttatgttcacacagctggtgggagccagcactgagatctgagtatctgaagttagagaggtaacccaaaatcattcctgccaaagggcagggtaggcagggcttagggaaacagttcagtcgatgagatcccactgtgggaacctgccactcccagcttccctcctcttgtgaggttgccatggtggcagaaacttatgattcctacctagatgagagtagattgtctcaggccctcacttagcccaacacacccccattatctcagcaactcagtgtggagaatgatagtgttctgggactcttcagtgtcccttctgcctaccgttcttggaggtcctgcagtcacccaaagctctgtgttgtaaattctgttttggaattatgtggaagggtttctatttctggcaagcaatgggatgaaatgtggaacattatctcaggcataggaaccagcatgtgcaaatacttaacttaaggctaaactaggagtgttcagggaacctcaggcctccattatgtctggtgggatcagacagcagggacaggattcagcccagaaatggcagcctgaggatctgggtttgtatgctgagagaattgggagccactgcaggtttggagctaggagggagtgatctgactttggtcttaaccaacttcctctgtacagtgaaaaaagactgtgggagtgaggatgaaggaaggaataccactgaggagcttaatgcaacagttcaggttggaccagagtggtcgctgtagaggtgggagatgtggatggattctgaatcatttttcttaaagtgggaccaaccagattttctgatgtggaagatgagaaagaaaaggcaaggggtgaaggaagaccctggattttttagtctgagaagatataaagatgccatcaactgaagtgacaaagttggtggtaggagtacctttcagaggtaatatcaggagtgcagtttggctatgtggaatctaccatgttccaaagacacttgagtggaggtgtcaagtagacagctggacacagagatctgaagttcagagaagggattcaggttggagctatccacagggtggcagccagcatgtggatcaggatggagctttgcttccaatttagagagagaatctttaggtcatggtgacagtgccatcagcacactgtaagggcagacacagcagggtagaggtaggggccatcttagagtctagaagagggagggaaatgtccctgggaggaaggggaataatagggtcaggcaggtggcaaagcgttccaggcagagagtggatgtgaggtgaagtactgtagtaatagaagtgaggtggcagtgaggccagagccagtgcttattcagctctttatgtgctcctcaggcttccatggtgacctttggtgggacctgtggagtttcagtcaagctagtgaattagcccagggacagattgggtcagtaggcagaatccctgtgcttggggtaggtgcccagtgagtgtaggttttgaatgagttaaatgttgagaagcctgtgactgacctcagtagtacaacaacaaagcagaaaagggctgagtttatctgggatctgcacatggttctggattgctgaattgacccatgaaatagagccaggaggggaagatttaataggtggattcagggcaacccatggcagtgtggccgttgatcaggaccagatgtaatcctggatgcattatccaagcattctctggatgctgtgtgcagatttgcatgtggggaagccatggaggtaccagtgttgtgggtgtccatagatgtaaaggaggtatagccaaaagggtgatgtgcacatggagatggagtgtgaattcatgagcccagagctttggtatggagggtttctgaaagaatgcttagctcaggtttgtgtatgaggaataatctgttgatccccagggagctggctgataggagaagggttgggtcctacataccaggcccatggtgttttatctgtccacttgcctgttctgagctggacaaaatgattaatggaatatgagtcgagaacaggcaccaatcacaccagggcctgttatctcatttgagttagatgtgacaaggagtcctggagagagaggctgtccttaagctcagttgtccacctcacacagggctatgtgaccttcaaggatttatttgtttacttctcttaggaggaatgggagctgctggatgaggctcagagactcttctattatgaaataatggcttctgtgcttcgcatttatagtctccctgggtaaggccccagtatcccatttttctgggctgggtcctactcttcctttttgccctaggggttgctctttcctttccatagctagagcatgggtactgctctcttctctgattccctcacataggtcccctgggtgcctaggctcagctagatgcattggcccctctcttccctgtgttcctcaactcctgctgccctgaagccttgccaggaagggtttggaggtcaggggtcctaaggtgacccagtgaattctgcttggcctctccctggccaggtgactgtccacactcatgacacctctggactccaggctccacccgcttcctctaattgtaatttccttgagtctgcctgtgtcctcaatttcagtcatcatggtcaccacttgtgggcccactgcactgttcctgcaggacaattttctgaggttcattttgtagcatttgttttcttgcaattttgcatgggtgggctactctggctagtgctctcagcctgtttcacctttcccctatgctttgtatcttccagatcctctgtggttgttgaattgtaacaagagagagaactctggctgcctgagagggcatgactctagtcacagcaggaggggcttggacaggccctggtgagtgggagctgagggacgccataacctcagggctgggttcctgtagttccggaaacctatgttgtgcccatcacaagtgccaaggccagaggccctaacttatttctacctttttatccccattctgtacactcttgtcatttctaatctgacttctgacccagggctgtcttctcccattctctaccagaggggctctagtagagcaatagctctctctgcgatgctttccaatattgtactacacttacactattgtgtcataagatgtgtgcatatctgtaaatagtccctgaacacgttacttatttttaatcacattttcctgggcctgtactcacatttcgcataggagtcacctgtcacccacagtcagccaaggtcctgctaaaagtcattgcagaggattaagttggagaccttgtactacaccccatcctcgtgtctttgtttcttgtgaggccatctccattctgtgactcttagattccagtactgtacagcagcccttttttcaacctgatcctagctctgttccaccaggaaacttaggtactcagtcctgggtacagcagacacatatttgtgatgtagttgccccacccaccaaagtcagcatgtacatcaatagtatttttctgccttcaggttgttggcatgaagtgaaggatgaagagtcatcttctgaacagagcatttctatagcagtgtcacatgttaatacttccaaggcaggtttgcccgcacagacggctctcccttgtgacatatgtggccccatcttgaaagatattttgcacctggatgaacaccagggtacacaccatggactgaaacttcacacatgtggggcatgtgggagacaattctggttcagtgcaaaccttcatcagtaccagaagtgttacagtatagagcaacccttaagaagggataaaagtgaggcctcaattgtgaagaactgcacagttagcaaagaacctcatccgtcagagaagccctttacgtgtaaggaggagcagaaaaacttccaggctactttgggtggctgccaacaaaaggccatccacagtaagaggaagacacacaggagcactgagagtggggatgcatttcatggtgaacaaatgcattacaagtgcagtgaatgtgggaaagctttcagccgcaaagacacacttgtccagcaccagagaattcatagtggagagaagccttatgagtgcagcgaatgtgggaaagccttcagccgcaaagctacacttgtccagcatcagagaatccatactggagaaaggccttatgaatgcagcgaatgtggaaaaaccttcagtcgaaaagacaaccttactcagcacaagagaatccacactggagaaatgccttataagtgcaatgaatgtgggaaatattttagccatcactccaatctaattgtacaccagagagttcacaatggagcaaggccttataagtgcagtgattgtgggaaagtcttcagacacaaatctacacttgttcagcatgagagtattcacactggagaaaatccttatgattgcagtgattgtgggaaatcctttggccacaaatacaccctcattaaacatcagcgaattcacactgagtcaaagccgtttgagtgcattgaatgcgggaaattctttagtcgaagttctgactatattgcacaccagagggttcacactggtgaaaggccttttgtgtgcagtaaatgtgggaaagactttatcagaacctcccaccttgttcgacaccaaagagttcacactggagaaaggccatatgagtgcagtgaatgtgggaaggcctacagcttaagctcccacctcaatcggcaccagaaagttcacactgcaggcaggctttaggagtgctttgaatacaacaggactcatcaatcagatgttgaatttcatgtatctgaacattgacacaaaggagataccttatggtgccaggtacgtgggaaccttctagggatatgttgcactttctgacttgctcaggttttttgccagagttatgtcactgtcaatccatgtggccgaaaccatcttaactctaccagctaagataccccagcattggggaaggcagggttttgtattgtccagtccctggagaaaatcatgaaatgcctgagttcattgggggtcctcattcccttctgtatgacaggtataggtatggatatgacccatttttagccaagagggtctgagctgtatctgctggtggcttatacaaaaagtttactttcttcatggatattcttggtctcacatacttgtaatcaagtttttccagcctccaagtcacctggcctgggaaagtacttgcctcatgttgctctggtttgtgataataaaggctttacagtttaagccacatttaatcttggggcttcttcttatggtctggggtggattgaaaacaggctctgccaaactgaagacagcctttgtgcggtgcctccaactttgcctcaaatgggacagtgggttgagggagaacagttcttagtccagttttgatgttaacttccatagctgacaaagcttgttaagtaagaattaagatcttgtgtagacctgatttgtctggattttagagttatttgagagcccatatttcaccttgaggagggtgctgctgctgtgacagcctgcagtgttttgaaacagcatggattgggtgtcttgtttgcagcatgtgtcccatgttccccaacactgttgagggaaagctgttcctcaggacctgctgagtggccatattccctgaaggcctgaatctgtttcacaggccactgttggtaagatctaaagcatccagtagggaaacaaaattgataaatattgagtgtgagtaattgggattggggagattgtggcaaactagaggggaagtgcccattgtaaaaacacatccacagacagtccaggcactaaggctgaatgggatcagggtatccagaaatctcaggatctccagggccatgttactgttaggtcaaggtcactggtgcagcaacgaatgtagtttttctagattcctctccctccctgggctctttacctaatgtctttgcggcacaggcggtaaccctgggagtaaagaggtgtggtccaaggaagtagcttttgtgaccagctggagtttctggtgactcttttggcaatggtcctcattgtttgccagtttttcttactactgaggaagagattgtcttcccaagatatttggagtgataagagtcaccatagtgaggtagagtcactcttagtgatgtccagttgtccagtttccaatagaagtgggagatccagatttttaaatgggataactttttataggttcactgaggtgtaatcaacatgcaatatattgcacatatttaaagtgtacgagttaagtcttgatacacacacacacacacacacacacacacacacacacacttgaaactatcaccctatcagtggtattggacatatctgttacccccaaagttaacctgaggcccttaacctttctctcagtgctcgccttcccccagaatccctaggcaaccactgagtagttttcactgtaggtaaatttgtcttttctagaattttatgtaagtctgcctataaagtgttaattttgcatgctgtctttcatgcaacataatttgaaatttgtccatggtatgtatgaacagtccattttaaaattactgagtcatattctgtatggatataccacagtttatccatttatcttaattgatgtctgtactccacccccatttttaaatattaaaaagctgctgcaaatattgatgcatgagtctttatgtggacacttagctgagaacatttttaagcagaggttttgaaggtgtgaccatatatcttactaattatagtaaaatatattggaaaagagatacatacagggaagaactgtgaaacagaaaagacctaagatttgatgatttgggaaattctcagcccatcttaattggaaaaaaaaaacaaaccattgaaattaagagattcattgttaggaaagatagatgttttagagagagagatgttttagagagatagccaaggatgtttgctgataccgggatcaaaacatacatcagaacactgtcacacaaaaagctctttgaagagattaaatgtgacttgtagatcccctcaatacaaacaatttataagaagtttaaactatcactcatctcagcaaaagccaaaaatatagataggggattccctaggaggaataatctgcataaacctcttttctaatgttgtgaatttcagtgatgtacaggagactcacaaaattcttgaaaattttataccagtggaaatgctcaccttgggtctaaagggaccttgaaagtatgaagttaaagggtgtaggcatgtaaagtgtgaagttaaaggttgtaatattctatacatgggactggctgcggaaacaggtgcaagcccttgctacctttcatgagaaaggaaggatgactcagagcagaggagagtccagtgggcagagtcctgaaccatgtgatattcccatgtcttgactcccagtggcatttgccaaactagatttcagattttcttgggattggtggttccattttttttgttttccccccttccatttcctccccttttgaaacaatgcatatacatataactattatcctaggtctttcccaaccttttgtttgggagcagataactagttttctagttttacagatccaaatgagacaggaatagcactgggtggtcacaggaggatggaaaatctcaacaccctggttttggtgcagctgaaaaaaaaaaagaaaaacccaaacaacagctaaaacgggaactaggcaaagaaaccgtgggataacagaaaacccaaaacaaaagagaaaactgccagaaccccagtcagggtgacatgtctgtaactcttccaggcaaacccaaataagggaggaggggtggtaatcaggggtccctgaaatcccctcttttcccagaatacctaatgattacccctattaaaggaacacccatacaattagaaacccaaactttgttttgcatgacttgctctcaggggcactcccacacttctctcttgtgtgtacttttgcttcacaataaaagctgcttgcctttgcttcactgtgactcgtcactgaattctttcaatggtgttaagaacctggatgctgctggggctgggatctcaccaacaatgtccagagacccccccgaaccccccagcaacacagagaagaattgtgccccaagatgggattatacctagagcctcatccatattggacttagacaatttagatgaaattggagactttagctcagtgtggaggcgcacacctgtagtcccagctgctcaggaggctaaggcaggagaatcgcttgaacccaggagacagaggtggcagtgagccaagattgcgccactgcactctagcctgggcaataaagcgagactgtctcaaaaaaaatcataaaatagtaaaaggcatcaaatttttgaggggaaatacctattggtgaactgaaaactcgacaacagttctggtgtgtgggataacatgttaatagccttgatcattttgaatttcataatcataaatgggattttgtttttgagatggggtttcactcttgttgcccaggctggagtgccatggcactatctcagctcactgcaacctctgcctcctgggttcaagcgattcttctgcctcagcctcctgagtagctgggattacaggcatgcaccaccacgcctggctcattttgtatttttagtagagacagggtttctccatgttggtcaggctggtcttgaacttctgacctcaggtgatccggctgccttgacctcccaaagtgccaggattacaggcatgagccactgtgcctggccttttgggattggtttaaagagctgtggaagacaattgagcaattaccacagagattagcaatggagttcctagtatatttgaaaatgaataaaattgttcctgggaaaattaacaatagtgatctcagtctaaattacagagtaagcaattcagagaggataatatgccacatatgcatagatttgtttaaaacagtaaattatatagcactgtaaaaattgaaaaaaatactattagaacaacaaacaattaggttgatgaagcacaataagagactaatgaaaaggaaagaaatgaaattacttaatatcaaaatgtatgaaataaatttaagccatatacaagcatgccaaattaacttgtgagattaacaaagagtgtattaattggggaaaaagactaggagtctgcaaatcctaagattaggcttaacactaagcctcttacaaacttcaagttttcaaaaaggctcaaggttttctggtacagaggtactatgggagcacagttcagatttaacttaacattacgttatttaggccaggcacggtggctcatgcctgtaatctcagcactttgggaggctgaggcgggcagatcacgaggtcaagagatggagaccatcatggctaccacagtgaaaccccatatctactaaaaatacaaaaaattagccgggtgtggtggcaggcgcctgtagtcccagctacccgggaggctgaggcaggagaatggcatgaacccgggaggcggagcttgtggtgagccgagatcacaccactgcactccagcctgggtgatagagcaagactccacctcaaaaaaaaaaaaaagaaagaaaattacagtctttaggaaactagatattcatcagagagtgtatgtgaccagaataagccatcttacgacgtctagatgacacagtaaatacttatgctgattcaaaattacctgagctacttcaacataggacatagcaaaacactgataattacattactgtatacttataaaagatgcttgtggctgggtgcagtggctcacacctataatcccagcccttcggaaggccaaggcaggcggatcatctgaggacaggagttccagaccagcctggccaacatggtgaaaccccatctctactaaaaatactaacattaggcaggagaattgcttgaatccgggaggcagaggttgcagtgagcagagattgcgccattactccagcctgggcggcgagagcaaaactccgtcaaaaaaacaaaaacaaaaaaaacaaaccatgctttcaaatctgcctaacaattatagcttcagagtccttgtattcaggattatctatttgtaacttactactttttacaaatatttttcttacactaaattagaaagaatgtttggtctcgcaggtgtctgagaatctttagtaaaatacccctacagattctattttggaatcatggttttaaaaaaagcaaaagtgtgtatttccaattaattgctacagagatgccaaatgtccactcagtagttgtgagtaaaacaaattgtcttattgctcttcacttcacaggcaaataaactcttcgagtgattgtgtgaagttcagagtattaggtcagggatgaaatggaggctaatccagacacgttataagagaaaatatggaatagagattctaggggcactaaagcaaatgcatgaggtggtctatgcttctgagtccctcatagtatgttccttctgagtatttgtattctaaacctcaaaattacaattttttgtataacatttcttactggattctccaagatataatctactttttgaagaatatgacatttatgtagaaatagtggttacttaccaaactggtatttgctactaggaaagtagcatcagtttttggcatgggcatctgaactctgagaataaggtttgggattccatgacctcatctccttgctgggaagtgatggtcattttattcttccacctgtaattgcagtgacagtgtctccaagaggattggagatgatctctgaaaaaaatttttgaagttagaaaattgtagaaagttattaacattaattactggagttatccatttagaatgacatcatacctaaaagagaaaattatctgtgaaatgggaacaaataaaggtaaatagaggaaacagttctaagacatgggacatgtaagttgaacccttggttatgctggaatcttggctcctatgaaatttttttttttttttttttttttttttttttgagatgtcttgctctgtcgcccaggctggagtgcaatggcgcgatctcggctcactgcaacctccgcctcccaggttcaaacaattcttcagcctcagcctctcaagtagctgggattacaggcgcccaccactgcacctggctaatttttgtatttttagtagcgatggggttttgctatgttggccaggctggttttgaactcctgacctcaggtgatccgcccgcctcggcctcccaaagtgctgggattacaggcgtgagccaccgcgcccagccgaaattcttatttctacaaagtctgacattttttcattcatatgaatggtgaggaataacaaacttggaaggaaagaaatagtaaaaagagagtgagagtacaaaggtgaaagagttgagggaaagcattactcaacatcttatctggttcagaggctcatctagatttgtatttacagcagtgaacaacctacaaagaaatgtattctcaagtaggctttattcaaattaagagatgtggtctggaaataataaagaaaatattggaaaatatacactaagttataaagagacagattctatggaaaatatcagaataccagcaccaagtaataacgaacacgtgaagtaggtagaatttctataggaaatttctatagtcagggttgtccttatagtggagataatatttgagcatatatttaaagcacagcagagagagagtgatttgtaaacacagagaaaatgtgctatggaaaagaaatagccagtacagtgtccaaaaagcctggaagtgaaaaatcatgtggtcaaagcacaattcaagagtgactggtgatggtttttataccatcaaaaatctccccaatgtgcacaattacccatgtatccattcacatgccattatctcagacctccttgtcaactgtcttctcaaacatattcttccttgcccttgatcacattgccaggtcatggactgctatcctgtaaaatacttgttctttggacacttattcctcctcataaaaaggtttacaaggtatgccacttgtgacttcacctatggggaaaattttgatccccaactatctttcaagaggatgcagaatatggctctgaggcagccacagttttgttttgtttttttttttttgaaatttatctttttttcccaccctgccttatggtgctgacacaatcttttttattactaggtttttaagagcacttttaggtttgcagtaaaattaaggggaaggtaaagagatattccatatactccctgcacctacataagcatagcgcccctcaccccaaccgcagtggcacatttgtagcaattataaacctacactgacacatcattatcatccaaagtccctactttactttagggttcactcttagtgttgtacattctatgtgtttggacaaaggtacaatgacacgtgtccactattagagtgtcatctaaaatagtaatcctctgtgctccacaaattcatccctcctacccttctaaacccccagcaaccactgatctttttactctttcatacttttaccttttctcaaatgtcattaattggaatcatacagtatattgccttttcagattggcctctttcatttagtggtatgcatacaaggtacctccatgttttttcacgtcttgaagattcatttaccttcagcattgagtaatgttccattgtctagatatactacagtttcttttctttctttgtttctttttttttttgagacggagtctcgctctgtcgcccaggctggagtgcagtggcgtgatctcggctcactgcaacctccgcctcccgggttcacgccactctcctgcctcagcctcccgaacagctgggactacaggtgcctgccaccatgcccagctaattttttttttttttttttttttttgtatttttagtagagacgggggtttcaccgtgttagccaggatggtctcgatctcctgacctcatgatccgcccacctcggcctcccaaagtgctgggattacagacgtgagccaccacgcctggcgatatactacagtttctaatccattcacttactgagggacatttttgttgcttccaaagtatgccaattttggataaaactgctatacacacacatgtacaggtttttgtgtggacataaattttccactcatatggataaattctgaaaaatatggttaccgtattgtatggtaaaagtgtgtttagttttgtaagaaaccaccaaactccatttcaaagtggctgtacaactttgcattcccgtcagcaatgagagctcctgttgctgtacattttctcaaccatttgcagttgtcagtgttacagaggttgttcattctaatagatgtgtagtggtatctcagtgctgttttaatttttacttccctgatgacatatgatggggattatcttttcatacacttatttgccatctgtgtatcttctctggtgaggtatctaaacctaaagtctttgcccatttcgttttttaattaagatgtttcttttttttcttttttttttttttgagacggagtctcacactgtcactaggctggagtgtcgtggcatgatctcggcttactgcaacctccacctcctgggttcaagcgattctcctgcctcagcctcccaagtagctgggactacaggcatgcgccaccacgcccaggtaatttttgtattttttagtagagacagggtttcaccatgttggccaggatggtcttgatctcttgaccttgtgatctgcctgcctcagcctcccaaagtgctgggattacaggcatgagccaccaagcccggccctgaaaaatttacacaattatacaaaacttacttaacctatgcttcattacctcatgaggagtactgggaagttttgagtacgtgcaatggatggaaacattgaatttggacataaagagttgtgtcctttttttttttttttttttggagtcttgctctgtcacccaggctggagtgcagtggtacgatctcgactcactgcaaccttcacttcccaggttcaagtgattctgattctcctgcctcggcctcccgagtaactgggattacaggtgccaccaccacgcccgactaattttggaatttttaatggagacggggtttcaccatgttggccaggctggtcttgaactcctgaccttaggtgattcgcccacctcggcctcccaaggtgggagcagcaatcacacctgctgggattacaggtgtgagccactgtgcccagccagttatgtcatttttcactagtttctcagttgattacctgaaagtatgaatttttaaagcacaataggattcagcagtctcaggtaggaaaaaggtaacctggaaagatccctgcatgtgaatgcacacacagctttcagggatctgaggaaattcagcatgtgtaggatatagaggagatacatggtaggaggtgaagcaatatgtaatggttggttctgtaatataggcccagccaagaactctaacctttttcctaaaaacaatgacaagcccattgtgagatctaaccagatgtacaatagtagtcattccacttataaatttttgtagtaaatgtgtaaacaaatacattatatatttgataaaatcatttcacaacttttaattttattttattttactggtattaatttgtcctaaaggatcatttttattgtgaaacgtaaaatttgatctatctaatatatataaaatgtatatgtgtacatttaacaatgtgcatatatgtaccttaaaataatataaactttctgggcgacggagtgaggccctgtttaaaataatgataataatttgatattttatgcattaaaaacttttgtctgggcatggtgactcatgcttgtaatctcagcagtttgggaggctgaggcaagaagattgcatggccctaggagtttgagactagcctgggccctatagggagactccattcctacaataattttttttttaactagccgggtgtggtggtgtgcttgtagtgccagctactcaagaggctgaggtgggaggatcacttgagcccaggaagtggaggctgcaatgagctatgattgttccactgtactccagcctggacaacagagtgagaccctgtctcaaaaaaaaattaaatgttttgattatacaaggaaaatgaacattcatgtattaaagcttcatgttttatgaacaaaactgactttgcaggcaggagagcgttttctgggggcaccagaagcagggaacttcccttgtccgttggcttcagggctgcccactatccctccactatcttcccattgtagccctgtctggtgtcttttgtccctgacaaaacctacaaaaagtgactttaacacttcaggctgcatgcatttgaagagcaataagataacgttttttcgcttcccactaccagtggagatctgctggggtgggctgcatggaatctgaaatgatgtctaaatactgaagtgaacctctacactagagactgatatacagctgacccttaaacgacgcaggggtcagggataccgacccctgcggaattgaaaatgcttgtattacttttgactcccctaggtcttaactactaatagccaactgttgcccggaagccttatgaagttgcccggaagccttatgaattacataaactcccagtcgattaacacattttgtatgatatatgcatgatatatgcataatatatatgatatatgcattttgtatgatatatgcattatatatattttagtataagaactatacttgtactaaaacagaccagagaaagggtatcaggaaaattgtaagaggctcgttgacattacacccaattaaaaaaaggaaaataaaagaatacggaagggaaaatacatttactaatcattaagtggaagtggatcatcataaaggtcttcatccttgtgttcttcatgctgggcaagagaatgaggtcttgctgtctctggggcaagaggtcggggagctggaagaggcaggaaaaggagcacactcgaagtaacgtttattggggaaaaaaaacgcctacgtgtaaatggacccgcacagctcaaacctgtgttgttcaagtgtcaacctacttaagacctcaaacaccgaagcccctcagtcgccctggaaggcagcagacgcagcttcctagcgctcccagctgtctgcacacaaggcgccctccgtcgcagcctgggggagactacattacccagaaagccttgcgtcgagcggcagtactttgatccaatgaaaatccaagacaggggcatttccgtgtgggtctacccccgccccccccagggcgggacttgtggcgtcttcgcagcggtcattttggctgccctcccggaggtccgttctgtctgtcagccgctttggtacgctgcatcgggatcgaagtgacggaccgtgaaggcgcgagagtcaggtctgagggtcgggggcagagccgcccgcgaggccggcctggggatagcgatgctcgggttccccccgggtcgcccgcagctcccggtccagctccgcccacagactcggatggcgaccgcactgagggacccggcttcggtgagcgctgcgatctccgggcctcccccggccgagattcttaagtcccaagtgagaggcaccagctcacgtctctgtagcacagggtcggggacactgaggctcgtgggtggggcccctatttctgacatccgatgtggtgggcagggggacaagggacaggaccggcgcgtgcagggcttggacgggcaaccgagaagggggcattcaggaacctgggctccacattgttactgcagggaacaaagtttgagagagatctacctttattcttagggccgtgggagccatagagagcttgcgcaaacgagagacaccatctgagttaaatttgaaaaatcctctgcaggctgttcagtggaagaaaagactttagagatggatgaggacgttgaggcagagggaggttgaatatttttccaaggccacacaactggtgagaggcagcactaaggaccgaggcgcacaggttagacagtcgacccaaagttacgtggctctgggccggggcaagggtacagggaaggcctgtgcccatggagcactgccatgatcacattcctctgaggcctgcgtctttccacaggttcccatagctacagaggtgcttttcaaacttacacaggtaagtggaggtatctcagcccctcactggtctggaatgtccctccaccctccccagacagatattttctttagatttgtggtgtcatgggactcacctaccattctctcagcgtttggtttgggaaccctggagaatccctgagctaagggccctgagtccaggccaatgtttccatttggagcagccaatggaaagatgggtgaaaatttatgatagaaacaggtaggtaccagcttttggaactccttggaggtgaggctgagctggttcagggaactgcaggtttcctttatttctgtgaagtttggcatctattgtgaggaagttggagtttgggatcagaggagggagatttatctaacccaagtgttgacaggatacagagtggaaaacagaatgaacacagtgactaatgggaatgtgaagagacagcagggatcaatgacaccaaggtctggtgtctcttctgacttggggatcttgggaggagaatgtatggggacatggattttgagtcttccaaattgagactgttcatggtttcatcaatccctattatgctagggaagtgtgacctttgaagatgtggccgtgtacttctcctgggaggaatgggatctccttgatgaggctcagaaacacctgtacttcgatgtgatgctggagaactttgcacttacgtcctccctgggtaaggccctcatactcacccttgtgccctggactaggctctctgtttctccttttcctcaggagcagctctgtcctcatatctggactataggcactgcctccttccccagttccctgggtagatgttgtggactgagtgcaagcctacttcccttatcgtcccagcccaaaagcatcttgggtaaggatttgggatcagtagtcttacagtaagcctaatagatcccacctgacttgccttctccctgtctggtgactttctagatctatggcacccagttttccctcccttcgtgtacctaacatttatttgtgctagactgtgacatgaaatgtagtcactgacattgccactatttacacagactgttcttcaaccaccaacctttccattaacagcagaacactctaacaaattgtgccgcagagacattacacagactgttcttatagaaacctccttcaaggtgtttttctttgtttttaattgtaaaatatatataacaaaatttaccattttaatcattttcaagtatatagttcagcgcatttagtacattcgcattattgtgcaaccatcaccaccatccttctatagtactttttcatcttataaaactgaaactttgtactcattaaataataactcttcccatcccctggcaaccaccattttacttttggtctgtatgaatttgtctactgtaagtacctcatatgagtgggatcacacaatatttgttcttttctatctggcttacttcacttagcataatatcttcaagattcatccatgttgtaatatatatcagaattgcttctttttaaggctgaataatattcttttgtatgtattacagtttgtttatccattccttcatcagtggacacaggttgttttcaccttctggctgttgtgaataatattactgtgaacatgggtgtacagatacgtatttgtgtccttgctttcaattcttttgggtattggcccaaaagtagaatttctggatcataaggtaattatttttaatttttaaggaaccactaaaattgtttttcatagcagctgcaccattttacattcccacaagcagctgacaaaggttccagtttcttcacaccctcaccatcacttgttattttctgatttttttgataagtcatccaaattggtgtgaggtgatatctcactgtggttgtgatttgcagattactgatattgagcatctattcatgtgctgattggctatttgtatatcttcaaatgatattgcttattcaagtcctttgcctatttttaaattaggttttattaattataattagaagtattaaatataattttttattgagctttaagggttatctgtgtgttctagatattcccttatcagatatgtgatttgcaaatgttttctcttattctgtgggttacgtttttagtgtgttgataggatcctttgatgtacaagtttctcattttgatgaattcagttttacttttttacttttattgtctatgctttttatatcatatccaaggaatcattaacaagtccaatgtcatgaagctttttccttgctttaagacttctatagttttagtacttacattcagatctttgatctgttttgaattaatttttatatgtggtgtcaggtaagggaccaacttcattctttcacatgtagatatccagttttcctagcatcatgtgttaaaaatttgtcttctttctcctggtcaaaaatcatttggccagatatttgagggtttatttctggggtctcttctagtccattgatctatatgtctttctttatgggagtaccacactgttttaatttctatagccttgcagtaagttttgaaattacgaactgtgagtcttccaactttcatccttttcaagattgttttagctattctgtgtctctcgatatttcaaatgaattttaggatggatttttttatttctgcaaaataacgtcatttggattttgataggtatcgcactttctatagattactttggctagtatagacatcttaacaatattgagcactctagtccatgagcaggcatgtgatctattttattaatgttttatttaattcattttagcaaaattttgtagtttctagtgtacaaggcttttacttgtttggttaagttaatctttaatgttttattctttttgatataagtggaattgtttacttttcaaattgttcaccattagtgtatagaaacgtaactgatttttgcatgttgtatttatattctcctatttgctgaatttccttattagttgtaacagtttttcagtggaatctttatggtattccatgtatatcatctgtgagcagggataattttactcctcctttcccattttggtcccttttctttctttttcttgcctaattgctatgttgaacagaagtgctaaaagtagcatccttatcttgtccttaatcttagaggaaaatctttcagtctttcattgttgagtataattttagctgtaggtttttttttttgcatatggattttattatgtttaggtaatttccctgtattcctggttttctgagtgttttccccacgaaaaagtgttgcatattgtctaatgctttcagtgcatcagctgagatgatcgttttaatttttttagagatggggtcttgctatgttacacaggctggtcttaagctcctggccgcaagcgatcctcctgcctcagcctaccaagtagctgggattacaggtgtaagccaccactttgatcagtttttgtttgttgaaccatccttgcattccaggaataaattctatctggtcgtagtgcataatccttttaatatgctgttgaattcagtttgctagtgtttggttgatggtttttgcattaataatcatcaaggatattggtctgtagttttattttcttacacaatctttgtgtcatttggaatcagggtaatgctggccatacagaatgagtttagatgtgtgtatgctacagttttttgagagaatttgaaaaggataagtattagttcttagttaaatggttggtagaattcatctgtgaagccatcaagtcaagggcttttctttaaggtttgtcttttttttttttttttttcttgagacagagtattgctctgacacccaggctagagtgcagtggtgtgatcttggctcactgcaacctccacttcctggattcaagcaattctcctgccttggcctcccgattagctggggttacaggcacatgccaccacacctggctaatttttgtattcttagtagagatggggtttcaccatgttggccaggctggtcttgaactcctgacctcaggtgatccacccacctcagcttcccaaagtgctggaattacaggcatgagccactgcacccggccaggtttgtcaattttgataaccttttcaaagaaacaccttttggttttgttgattttttttttatattgtttttctcttctctattttatttatctagactttagtctttattatttttttcctgccagctttggttttagtttgttcctctttttataatcccttaagttgtaaaaatagattgttgagttgagatctttcttctttttaatgtttatagctataaatttcccctttagtactgcttttactgcatctccaatttatttcccttctgatttcttcatggccccattggtttttcaatattgtattaatttctacagatttgtaaattttttagtttccttctattaagagttcccaacctcatcccactgtggttggagaagatactttgtatgatgtgtgtctaaatcaaatgaggcttaatttatggtctgtcctggagaatgtttttggtacacatgaggggaatgtacattctgttgttgttgggtagaatgctctttatatatttgttagagctagttggttgtttaggtcctctgttttctctcttctctctgattgttctatccgctgctgagagtcaggtattgatgtctctaactgttattgtagaactatccatttctcccttcagttctgtccatttttgcctcatgtgttttgatggtctattattaggtgcataagtgtttataagtgttatatcttcttgctctactgaaccttttattagtatataatatccttttatatctcttgttaccctttttgatttaaaatctctattgtatgatattaatgtagccattcttactcttttttgcttgctatttgcatggaatatctttttgtaggctgtcactttcacctcatttacatctttggatctaaagcaaatctcttgtagacatcataaagttggatcatgggttgtttttattttaacccattctgccaatctttgtcttttggcagagtttaagctaaaagttgggagcatttaaggcatttacgtttaaggtaatcactgataaggaagggcagacttctatcattttgctctttgttttccccatgtcttatagccttatagcttttttgatcctaatttcctgcattactgcttcttttgtgtttggctcacttttttttttttttttttttagtgaaacttcccttgtcatttcctttatgtactttttttttttttttttttttttttttttttaatggtgtctcactctgttgcccaggctggagtgcagtggggcgatctcggctcactgcaacctctgcctcccataatcaagcgattatcctgcctcagcctcctgagtaatccctcctgggattacaaacgcacaccaccacacccagctaatttttgtatttttagtagagacagggtttcaccatgttggccatactggtcccaaactcctgacctcagttgatccacccacctcagcctcccaaagtgctgagattacaggtgtgagccaccacgcccagttctttgtatacttcatgtagctctttttttaaaatagttaccatggggattacatttaacatcctaaagttacaacactctaacttgaatttatacaaacttaacttctttaactttccttgttcttttttgtgccgtgttgttctgggccagtgttagttgctcacatgtcctgtctttcccttaggacttatatcatcctggtctcatgtagttgctcaactagggctaggggaagtgccctctgttcttcacaggatgttcatgactccagcctcagcaagatgggatcagagagggcctggcctacatgaatggcacttgggaaaaggcatgtcatcaggtctgtgtttaaattgcaccaggaacctgtcctgtttgacttgtcttgatgccattgccagagacacttcacttcgaccttcccctcttcactcttaacagtttacaaacttgttatttctactacttgtcatttttattttgacttctagctaacgctaatcctcacctctctggactccttatcctacctgttcttttcactgttccctctgtagtgttctttaatattattttgtcctgaagtgtgcatatctcccttaatagtccctgaacaccagttactgttccagtgagattttcctgggcctgggcatacacttcacagcatcacttgtcaccagcagatgtgatcccactaaaagctattatcagaagaattaattgtataacatgcctcttagtcctgggccataccttagccttgtgcactgtacctgggagggcctaccctattccgtaaccttagggacaagtaatgcacaacagctgcttcctcaacctgaccccccaactcacttttcctaaaaacaggcccatatactggttctttgctgtaactgatgtgcatttgcaattgcattgtctcctcctaataaaggtaacatgtacttcaccatgatctctttacttttaggttgttggtgtggagtggaacatgaggaaacaccttctgaacagagaatttctggagaaagagtgccacagttcaggacttccaaagaaggttcatcttcccagaatgccgactcctgtgaaatatgttgcctggtcttgagagatattttgcacttggctgaacaccaaggaacaaactgcgggcagaaactacacacatgtggaaaacaattctacatcagtgcaaatcttcaacagcaccagaggcagcacattacagaggcacctttcagaagttatgtggacactgcctcgtttacacagagttgcatagtccatgtgtcggagaaaccctttacctgcagggagatcaggaaagacttcctggccaacatgaggtttctccatcaagacgccactcaaacaggggagaagccaaataacagtaacaagtgtgcggtggccttttacagtggaaaaagtcatcacaactggggaaaatgcagtaaagcctttagccacatagacacacttgttcaggaccagagaatcctcactagagaaggactttttgagtgcagtaaatgtgggaaagcatgtacgcgaagatgtaacctcattcagcaccagaaagtccacagtgaagaaaggccttatgaatgcaatgaatgtggaaaattctttacctactactccagtttcattatacatcagagagttcatactggagaaaggccttatgcgtgccctgaatgtgggaaatcgtttagtcagatatacagcctcaatagccataggaaagttcacactggagaaaggccttatgaatgtggggaatgtgggaaatcttttagccaaaggtccaacctcatgcagcatcgcagagttcacactggagaaaggccttatgaatgcagcgaatgtgggaaatcttttagccaaaactttagcctgatctaccaccagagagttcacactggagaaagacctcatgagtgcaatgaatgtggaaaatcctttagccgaagctccagcctcattcaccaccggagacttcacactggagaaagaccctatgagtgcagtaaatgtgggaagtcatttaagcaaagctccagcttcagttcacatcggaaagtccacacaggggaaaggccttatgtgtgtggggaatgtgggaaatcctttagccatagctccaaccttaagaaccaccagagagttcacactggagaaagacctgttgagtgcagtgaatgtagcaaatcctttagctgtaaatctaacctcattaaacacctgagagttcacactggagaaaggccttatgagtgcagtgaatgtgggaaatcctttagccaaagttctagcctcattcaacaccgcagagttcacacgggaaaaaggccttatcagtgcagtcaatgtgggaaatcctttggctgcaaatctgtcctcattcaacaccagagagttcacattggagaaaagccttagctgtactgagaatatgcaatttccttttagtgtaattatactgaaggagtacacctgtgagagagacaagtacctgatttggaagccccaacatctaaggatatacagtgggcggattccccttaagttccaggtatgtgttacactttctaacatgccatttagaaagtgttagactttctcacctgccatttatggctcttgccgtttatgtcactgacagtttctgaggcagaagccgtatcatgtctaccacctgtgaggtccacacagtgtgtatcatttacctcctgaacctgctcaaggaagcagacctctgcttctccccatttgctagaagaaatcatgaatagtctgagtcttcctctctgacaagttagggcatggacttgacccagctttgtgccagagaacccaatatgagtgttgttggcagcttgccaagaaggactgtctttttcaagacatactggtttcatgtgacacctccatggatttttttccagcctctaagtcaccaacttgggaactgcttgtctcacgttgctttgttttttacaataataaaagcattattatttaagctacctttatcttggcatttgattcactctttgaggtggttcaaaaacagaatcgggccctgccagctttacagagtaaacacctttggagggagagggaggtgtcatatgcctcagtgacaacagtataatggaaaaatacaactgtctttccagctttggcctaatctgaatttgaattattgcccaaggccttctaggaaatactgcaggatattatggtcttaattcgtggactggatgcaaggattttttgtgggctcaaaggacaccctgaggaagtgggaaattgtgacaaattccattgcttctgggaacaagatgaattttgttgttattcacaagggttattacatactgcccagcactgttgaggcagtctacccccagtgctgccaaggagccaagtgccccaatacaatttagtaggctactgtcactgtaaaatgatgggggaaccataattggtgtggaaacactgggttactagggagtgaaggagactgcagcaaactagatggaatgtgctccttgtaatatgttctagtaattgtgcaggatcagtgtgtacagacattcttagaatttccaggcatgtgtattttttgtagctgaggtgactgtcaaaaaataataaacaacctaaaggttttgtgtattccaatagcctttctgggatgtgcacctcaagaacattgctgcataggccaggaaaacaagcatagaaagaaggggcgggggatgtccttccaggaatgtgactttgtaacctaccatcatcctgtgtttaaatgaattcaaatcagtttcattgattaccagtatttgctgcccactgaggcaaggtgtccctccaaggtcatcaggaaagagagttaatgtagggttaccaaacctagtcaaaaacacattataccatcattataattattacaatgaacatatcagtcacctcggatttacctcaggcctttttctaagctctccctcccctctctggccctcaaggcaaccattgatttataccttcatttataataggtttgtttgtattttctataatatatgattttattaataaaatgtctttttttccagtttcattcatgatgcataattattttgagattcttcaatggagcttatatgtggtggtcattctttttattgctgagtggtatattttttatggatatactatttgttatccatttgtttataagcatttaggttttatctagttttggctattacaaataaagctgctagaaatgtacaattcttcatatgtgcatttttttcacttctcttgtgcaatgcctgagacacaggataaatgaatgtttaacttattaagaaatggccaaaaatgggctgggtgcggtggctcacgcctatactcccagcactttgggaggccgaggcaggcagatcacgaggtcaacagatcgaaaccatcttggccaacatggtgaaaccccatctgtactaaaaatacaaaacttagctgggcgtggtggtgcgtgcctgtagtcccagctgcttgggaggctgaggcaggagaataacttgaacccagaaggcggaggttgcagtgagccgaggtcacaccactgcactccagcctggcaacaaagtgagactctatctcaaaaaaaaaaaaaagaaaagataaatggccaaattgatctaaaatggctgtttgctcttgcttacctactgggaatgtgtgagaattccagctgtttcacatccttgccaatacttggcatggtctatcttttagaatgtacccttttaataagtgtgcagtagttttaattgcatttccctaaggattcatgatgttgaacattttttcatgtgtttatttgccaaatgtatatcttcttttttacacttttttttttttcttttagacggagtcttgctctgtcacccaggctggagtgcagtggcgtgatctcggctcactgcaagctccgcctcccaggttcacaccattctcctgcctcagcctcctgagtagctgggactacaggtgcctgccaccatgcccggctaattttttttttttttttgtattttttagttgagatggggtttcaccatgttagccaggattgtctcgatctcctgacctcgtgatccgcccgcctcggcctcccaaagtgctgggattacaggcgtgagccactgcacccagcctgccaactgtatatcttctttgataaaatgtctgttcatatacgttatctgtttgttaggaattgtgtctattttgcttttcattaacaaatcactagtttttgttccacaattaatttcatgctatgcacagtgtaattaccatatataccacacacttttaaatttaatctgtattattcacatattctctatcacattcttaagtctagacacttagtagtacagtgaatcaagctatggtttatagtgatgccagtttccctggtgtaaaacttcccattgtggccaatttcaaactgtcatcatgtcactgaatttggggttgggaagagccatcagaaacataccatttccataatagtgatccatatttaaatttacttctaaataaatttatttgcaagtttactacctgcaaatagcctctagaatgtagacaataaaacatagtaaaatgattaggaagtgacaaattttgaatatttgttttttaaaaaatataaaagaggtataattgacaatgcaaactgcacatatttttaaatgtacattttgatattttgatacacgcttatacccttaaaatcaaaaatttcattgaaaacaagtgaaaagacaatctgtaatactgttaacagttaacagttaagttattctgttaaatacatcagttgtccaaaaaacaaagtaggcaacatatttgaaatacaggcagttcttgctctattcatcttcatgaactgaaaatgccttgacaaaacatgagaaagaatggaagttaacaattgagatgaaatttgccaacatttattttggaatcaaagtctattttcattatgaatcctctgggattttgtaacataaagttttctagtgcaaatacattgggatttattaggatttactgataaagaactctcagtcacattttagttgtccatattatatatttggtacattctgtgataacggaaagtacaaatagcactaatgttttggggaagaaaatagctacttgttgcctccttcccacagaaccagggctagataatgaggagcacatctcactaactgatcacacagctgtctgtagacatttggccaggaagagcactgtgggatgaatcaaacaaccaggaaatcaggtggaggagaatcagaagagatgctactgtttgttttcaagtaaatcaggctatctccagaaggatcatcaatcatagataagtgtttacttctagtgttacacaggtagaacagaaagtatgttaaatttatatgtatttgaaagaaaaatttaagcatgaagtaaaaactgaaggaacattctagaaaagttttagtacacaaaataagagaatgtaattaaacggtatttcactgtagatttctgctactttggtctcacccattaaatcccctatacctcacatagttgacatgaacaaagccattcattattccactggcaaatactttcctgttatatatgttctattcattacctattccaacagcctctcatacacattcaccttcgaaggtgatttcaacagttctcagctgggcgcagtggctcacgcctgtaatcccagcactttgggaggccgaggtgggcagatcacttgaggtgcacatcatctggtgtgcttagcattactccatttctgatactgttagaaggcaacttctaactttgtcagctccaaccaatcccaagctggccaagcacctattgggtctcttttgctcctggaggcaacatagtctccatttacaaataccactcaggcctatttattcacccatccacaaaacagcccacttttggaggcctttacaacagaaggccctagagtcagttcagatgaccatataacagacatttcctttagtgcctcctggagattccttcatggtggactacccactagactctcttcttagactctggaccacacatctggccataagctgcccatgggcttctggtgcaaaaaactgcctgttttgtcctcatgtaacatgcaattagagcaacaactgccagctacatactgggacctcttagaaacagaagctctcacaggacctgaaccatggcacactccacccagttacacattattacctgggtcatgaaagcaacacctacaagctcagcctgatcaccaaggccttgatacaggatggagccaaacctgggccccctggtgtatctcacttggaaaaagaggtggccttctctgtcctcagtctcttgccagatgccatggtgaaggaagtctcctctctcctgggcccttggcagccctggaatcaagtaagtaaacaacaaggggagaacacatactttgttgacagtaatgccaccactacatgagctggagctctctggaggtctgctgcttttcttctaaacaagacacactgctgaaggatgggaactgcaggcagtcattttagcgctggaggctaccttggccaagaaattacctcaattacacttctagtcatttggtgcaaccaatggcaacaatttctcgttcaagatcatactcttggggtaaacaacttcaggaatttcttgcctctcagatatcaaagatataaattaagatcatgtatgtctccgcccacaccaaggctcagactgctgaagcctaacttaattcccaagctggtagattacaacaattttcaaaaactaggaccaaaactttgttggatgaccttccaggcccattcctttatttttggcccaataggcccatgaaacaacagtcatagaggaacctctatgaggaacccaatcttgaagactggggctaaacacaaagtgtttccccacccctctaccatggccaacatgatgacgggtcagtgcactctgtgggaatacctgtcattggcaagacaactgaggtgtgctattctggatcccacttttagtcatgtggcaggtagattttaccaggccactgcctctgtctaccagtgccacttgttatgctttgactgtggttgatgcctaccgccgacatcttactttaccccactagacatggcactgctgaagctactatacagcaccacaaaacgctcctattccctttggagttcccgacaacagcggtgaacaaagctctcattttagacaaagcatttgagagaacttgcgacattccaatcagtcccaggctgctggttttatagaatgccacaatggcttacttaaaacttagtagaaattatgaaatagcatatggtcttatagatgggtctttttcctgccattagaccttattatactaaattcccagctctattccctgccaaaatgcactgaaaacatctccattagatttcattgccctctgtggtgacacttcacataacagagcttacaaagatcatattgaactaggcattcctcctgttcttcctctttctgctatcacttttcagtccccatcctgactggaaagaaagacagactgagggtggattgtgagttatgatcctcatgaatgaatgcccctttggcttcctgccagagccatctggcaccctgctaacgttgagtcgcctaaggcaggagttttgccaaatattcttggttataaaggatacttaattacaaatgcccataatgatctcactcaggaaagagaaatcatggctccaagacccacaaccacaccgtgtcaataacaggccagcaaagaccaaaactgaatttgtctaacagcatcctccactaaggaacgcaggctccccctacctcattggcagttttgtacacctgtgtgtgtgtgcgccgtaggctccctttcaactgcctcaccatgtcacagcttattcagctgactgtaagccttaccatggcactctccacacactctccacacataatctatttggctggtcacacctcaaacctaaacttgttctcctggacttctcttaaaaatgccaactccagttattcaagatgacccactattatgtctgaccaaaatgttcactggcaataattcataccaaataccaagtccaagactttagcccctgagaacttattggttgtatttcccgaaatacccctcgcttctgaagttattgagtccttaatctcagacttctcttaatttgacttgcactatgtgcattttggggccaaatataaccttttgttatcctgccaaaaaaagttctgtattttgattgtgatggtgattacatgtatctccacacgtgataaaattgcatagaactggccagaagtggtggctcatgcctgtaatcccagcactttgggaggccaaggctggcagatcacgaggtcaggagtttgagaccagcctggttaacacagcgaaaccctgtctctactaaatatacaaaaattagctgggcatggccgggcccagtggctcacgcctgtaatcccagcactttgggaggctgaggcgggtggatcacgaggccagtagatcaagaccatcctggctatcacggtgaaaccccatctctactaaaaatacaaaaaattagccgggtatggtggcgggcgcctgtagtcccagctactcaggaggctgaggcaggagaatggtgtgaacccaggaggcagagcttgcagtaagctgagatcatgccactgcactccagcctgggtgacagagcgacactctgtctcaaaaaaaaaattagccaggcatggtggcgcgcacttgtagtcccagctactcaggaggctgaggcaggagaatcgcttgaacccaggaaatgcaggttgcagtgagccaagatcaccccatggcactccagcctgggtgacagagcgagactctgtctcaaaaaaaaaaaaaaaaaaagcatagaactacacacatacaacgagtgtataaaatggtgagctctgaaagaggtctgaggattgaaccaatgtcgcattcctggttttggtaatgtactaaggttatataagatgttactattggggaaagtaggtgaaaggtactctgcactattgatatggtttggatatctgtcctgcccaaacctcatgttgaaatgtaatctccaatgttggaggtggggcctggcaggaggtgattggctcatgagggtggtttcccctgaatggtttagcaccaccctttggtgctgtcctcacgatagtgagttatcatgagatctggctgtttgaaagtgtgtggcacctccaacttcgctcttgctcctgatcccacaactacatttgcaacatcctgcatatctgtacttcaaaataaattcttaaaaatttttcactgttccgtatatttccacagtgtatatagttcactgttctgtatatttctacatcagaatgtataattttcggccgggtgtggtggttcacgcctgtaatcccagcactttgggaggccgaggtgggtggatcacctgaggtcaggagttcgagaccaaactgaccagcatggtgaaaccccctctctaccaaaaatacaaaaattagctgggtgtggtggcgggcacctgtaatcccagctactcagaagggttaggttactcaccactatactaatgaggatgaagcctctttttttttttttttttgagatggagtcttgctcttgttgcccaggctggaatgcagtggtgcgatctcgactcactgcaacctctgcctcctgggttcaagcgattctcctgcctcagcctcctgagtaactgggattacaggcgcctgccaccacccctggctaatttttgtacttttagtagagacaaggttttgctatgttggccaggctggtctcgaactcctggcctcaggtgatctgcccccctcggcctcccaaagtgctgggattactagtgtgagccacgatgcccagccaaagtctcttttttataagggccttaatcatactcttaagggaggagctgtcataacaacctaatcaccttctaaaggccctatctcttaatctcataataccattgcattagaaattaagttttaacatgaatttccaccagcctcaggggctcacaccggtaatcccaccactttgagaggcagaggcgagtggatcacttaagcccagcctggccaacatggtgaaaccctgtctctactaaaaatacaaaaattagccaggcatggtggcagacacctgtaattccagctgcctatgaggctgagatgggagaatcacttgaacctgggaggtggaggttgcagtgagctaagatcacaccactgtactccagccagggggacagagtgagactccatctcaataaataaataaataaagataatgttagcccaaacggtgccatttcataaaccctggacagagtggaaaattccactaggtctttggctgtgagaaacatcctgccagacgagtcccaagcctaaccacctgactgcaggaaatccctcccttatcagcagctaaccacaacgccccaccccagtctacaacaagcccagacctctcccgcctagacctataattaccccaatctgtaagcaggggtggactccagcgctagctggtgtccccgtctacaggcctttgttcaataaacctgtgttgccatagagccatctccattccgttccttctcccttccttgctctcagttctgaaacccgggacgacgcttgggttcacttggaggaatccctttttgcaacctgggaagcagtgagcagcggcagctcatcccaggtgaattcccagatcctaattagacccttcactcccagccccgtcttcctaccactttcccttttctctccttcttccactaggaggctccagcaaggatcactccaattactggacatcatatccaacaccagtctccgatttctgggtgagttccccctttccccctctggattcctctcatatttccagaaaagcccagtgccaggtgagagaactccccagtcaccactgggtaaccctgacctgccttctcaggggatgtcctcagaatgctcactgctccaacccccaagggactgtgaaaagcttcagggatgccccagctcttctccatccctcctcatgattggaatcaggatactcaccaccccacacacctatctcaccctcctggccaccaatatggggcagggctcctaaaaaccccctcaagacacccctctcagatactcatccagaacctcaaaaccctgggcttggtgcactccattaaaaccaaatgccttattttcctttgtaatgtggcttggccccaatataagctggacaatgatagttgatggccggaaaacaggacattgaacttccaaattcaacgtgatctaaaaagctttctccaatgcaatggtaaatcgtccggggtgccctatattcaggcctttgtttatctctgtttgtggtcctctctctgtcaatcctgttcaccctttcaaatcctcctcttcaacaaaagacccacgaaaacacctcctctttcggacaagccttcctcctccgattttgacccagtcgatgaacctctgcccttgaacccctcctcaccaccatatcctcctccttctcctttggttccatctccccctctggctcctccacccccttaccatcatcctccattctcccttctttctccactgcatacacagtcctgtgcctaacaccctcccgctgaaggccatgcccacatccaaaaccctttcagagtccttcccttgtgggagacggcaggggctgaaggcatagtctgagtccatgttcccttttccctagctgacctcttccaaattgaaaagagactcagctctttttccacagaccctgcctccttctgtaagagatttttgtacatcactcaatcttatgacctaatctggcatgacctttatgtcatcctctcctcccctcttacccctgaggacaggggacatgtctggacagctgctcaggctcacactgatgctctccaccaccaagatgcagctcataacccagttggggccttcgttgtccccagaactgatcccagtgggattatcagccaacttccccagacaggtaaaggcaagatcataagataacatgcctcctggcaggcatgaataaagccactcttaaggtagtcaactatgaaaagataaaggaaattattcaaggccttgatgaaaatcctgctcttaaccagcctgatcaacatggtgaaaccctgcctctactaaaaaattagccgggcatggtggtacgcctctgtaatcccagccactcaggaggctgaggcaggagaatcacttgaacctggtaggtggaggttgcagtgagctgagatcactccactgcaatccagcctgggtgacagagcgagactccatctcaaagaaaaaaaaaaaaaaaaaggaaagaaaatcctgctctttttctttctcgcctttcagaagccatgattaaatacaccacctaaagccctcaggccaacaagggcagaatctatctccacttacatttcatttcccagtcaacccctgatattcagaaaaaaactccaaagactggaagatggccctcaaaatctccagagacttaatcaaagtggccttcaaagtctttaacaatagggaggaagaaccgaaaacccaaaagttcaaaaggtactaggctaaataccaggtgctggcagatgccatacaacagggttcccaatgcatacaaaaatcctcaacctcaggacagccctcaccaggagcctgttttaagtgcagccaacagggtcattgggcaaaagcctgccctaatcccaggctgccctcaaaaccttgccccatctgtggtatcaagggacactggaagtcagactgtgctcagcaagacgcttcatcctgcttgaccacctctaactcaaacaggtcccccattccagatcccagtctggcaagcattcttggcctggccactgaagactgacaggatcacccactaccatcaccaccttagaacgcagggtaacactgtcagtctctggtaagctcatgtctttcctgttggatactgggcaacatactcagttctaccagaatattctggacctctcctcagttcttccatcactattttaggagttgatggaataccctctaaacataaacagactggccccctattatgtaacctagtcaacacttgcttcacccactcattcctggtcatccctcaatgtcccacccctattttgggactgaatatattaatcaattccagttttccatagaatttaccccctgtcattctaccccttttattttactctgtcaactggacacttccctctcctctccctcatcttccttatccaatttgctagcctctgtcaaccccaaggtttgcgatgtttccaagccaacaatagcagcataccacaccccagacaaaataacctttcaaaacccttctacattcctttgtcagcccagtacctccttagcccagctggcctcagagacctcaaactcattcgttggaaattcctgcaagcccaaattctcaagcctgttaaatctctccacaacacccctatcctggccatctggaaagctgatgggtccaactacctggattttttatttattaaccaggcagtggtgcccatccatctggtggcccccaatccctacactttactttcccatatccccccacctccaccactcatttatctgtattggacttgaaggacaccttttttcaccatccccttggatccagcctcccaaagcctttttgctttcacctggacagatcctgatactcacacatccgcacagctaacatggactatattcccacaggggggctggaatagcccctgcttatttggacaggccctcaccagggacctggctaaacttccccttgctcctagcaccctcctccaatacatcaataacacccttctctgtagcccctcccttaacctatctatccatccaacacatcattcagcttctaaactttctccattcttggggatattaggtctcactcacaaaggctcaagtaacccaaccccaggttacctaccttggacttatcctaatccctaatattcaggccataccaacccaatggaagaagctaatccgggatatgcccctttctcatacaaagaacctcctttccttcttgagccttgtgggatacttctggctatggattcccaacttgctgaccaagctgctgtacaccacatcacgtgggcccatcctagaacacctggatccagtctgtaccattgactcccagttcaaaaaactgaaaaatgccctttcaatgtcgccagcactgggactacccaaccccaacaagccctttactctgtatgttcattctaaccaaggccttgttcttgggctactctgtcaaacattcagcggtaccccacaagccattgtatatctctcaaaacaactgaactcagtcatctaaggttggccaccctgtttaaggatcttatgtgtgtctatgctgctggcctcagaagctcaaaaactcaccctctatcaatacattaccattgcaccttctcataacctacaggaactcatgagtcattgctcccttctttccctcctgctatcttacttacaacaaacacacacctcctacataaacaaccttctaatcacctaccaaagatgtaaagttctcaacccagccaccctcttccctataaggacctttgactctgaactctgtcactcctgcttggactttttagattccctttccttccctttccgacacatatcagagacccccttacaggggacacctacatggttcattgatgggagctcctttaaagagccatgtcttgcagcaggctacaccatcgttgccaaacacaagctcctagagtccaatactgtcgcatcccctaccacctcctaacaggcagaattagtcgacctaactagggccctcaccctagcaataggaaaaagggtcaatatttacactaactgtaagtatgcataccacattctacactcccaagccttaatctcacaggaaagagcttttcttagtaccaaagggacctgcatagtaaatggcaaactgatacacaggttgctggaggtagctaaactaccattagaggccaccattatccattgcaatggacaccagagagctacagatgccataaccaagggaaacattatggcagactcagcagcctggcaggtggcccacaacatcccatcactgttgtccattttcccagcagacatccctcatacacccaggaggaacaagtcaaactaacactggggctacccaaagggaaggctgatgttatcttgacacaaactcatcctgcccaaatctcaagaactctctattccctcccacatccacaaccacttccatgctggttattaccacataccccagtttttaaaaacttacacacactccaccaccatgacaaccaaccttgaatgtttaaccagtctgcccagtttgtggtcagacttcccctgaaggggctcttaaaccacctcctttctccactcatcaggcatgaggccatttcccagaacaggactggcaagttgacttcacccatataccccctgtaaaaaaaggaaagggccaactacagcctgggaaaaatatttgtgaaacctctatctaataaatgatgagtattcagaatacgtaaaacatccctacaaatagcataaacaacacaatttaaaaataggcaaaagttcaagaccagcctgggcaacatggcaaaacactgtttctacaaaaattagctaataagctgggcatggtggtgtgtgcctgtggccccagctacttgggaggctgagatggaaggatcactgattccagggaggtcgaagcttcagtgagctatgatcaaatcactgcactccagcctgggcaacagggtgagatatcatagctgtaattccaacgctttggggggctgaggaaggcggatcacttgaggacaggagttcaacatcagcctggccaacatggtgaaacctcgtctctagtaaaaatacaaaaattatccgggagtgtccaggagtggtggcaggcacctgtaatcccagctactcaagaggctgaggcaggagaattgcttgaacccgggaggcagaggttgcagtcagctgagatcgcgccactgtactccagcctgggcaacaagagtgaaactccgtctgccctccgtctgtctgcaacagagctagactccatgtcaaaaaaaaaaaaaaggcaaaatatttgaacacatttttcactaaagatgatatatgaatggtatataaatgcatgaaaataagttcagaattattactatttaaggaactacaaatgaaaaccacaatgagataccactacatactcattttgatgagtaacattaaccgaatgatcacacctagctgttgaaggtatgaaataaactggagctctcatacattgctggtggaaatgcaaaataaataaatttggaaaacactgtagccgttattaaagttagttgtccacttatcatttgataaattaatctcattcctaagtataacctcaagagatggaaacgtgtccatagaaatacttgtataatcattcctcagtatccatgggggactgattccaggacccccaaggataccaaaacctgaagatgttctagtctcttatataatatgatgtggtatttgcatataacctgtgtatatcctcccacataatttaaattataatttaaattacttataatacctaatacaatgcaaatgctgtttaaatagttgctatacattgtcacctaatacagtgtaaatgctgtttaaatagctgctacacaatagttgtattgtttagggagtaatgacccaaaaaaggtctgtgcatgttcagtacagatgcaatttttcttccaaatattcaatttgcagtgggttgaatctatagatgcagaacccatggatatagaaagccaactgattttgcgtgttatcaacaattttcttcaaagctaaagactggaaaacaaaaacaaatgtctatgcacatctgaatgggtaactgtgttacatttataaatagaatattcctcataaatgtcaaggagggaaaaaaacattaatctgaatctcaaaagcacaagtgaaggaaccaaactcagaggtctatacagagtaaaatttctttcagataaaaatctagaaatggtaaaactcaagtggcaaaatgcaaatgagtgatcctcagatctgggcctaggaggaaggggcggactgcaaagggcagaagagtacatagggtgaggagaaccttctctatcaggattgtggtagtggttacatgctgtttatatttgtcagcactcatcaaattatacactggaaattggggatcatcctatttgtattatactgcactaaatttgtttaaggaaaataataatacacaccaaaaatattcacggctcaagaagtaatatacttcctgccgggtgcagtggctcaggcctgtaatcccagcactttgggaggccgaggcaggtagatcacctgagatcaggagttcaagactagcttggccaacatggcgaaaccccgtccctactaaaaaggcaaaaattagctaggcatggtggcacgtgcctgtaatcccagctacttgggaggctgaggcaggagaatcacttgaacccagaagacagaagttgcagtgtaccaatatcatgccattgcactccagcctgggcagcagagtgagactgtgtctcaaaaaaaaaaaaaaaaaaaagaagtaatatattcccaaattgctctcaaaaatactcttccttaatcttataaagaacatctgcaaaatcctagagtaaatacaataactcatggtccattattaaaatattttcgggaccagaaaccaaaggaggatggtcactgtctgcacatatagtcaattatattgaaagtcctgtctcatgcaattaggtgagacaagaaatatataatctgtaaagaagaaagaaagctaagttcctcgcccccttaaaatatatcttaaatgtcattttcactgtaagtcctactatgaacacctgatttactgtttcaccccatccttaccaactttacttctcagctgtatcctgctctataggacccatcattttctaatacactatcagccgaataacatgggtgctttgcttactgcttactgtctgtttctatcaactaagtctaagttccatgtaggcaattttctttttaattttgtgtgttgatataccccatataatgaaaaaatgacctgacccacaaaaaatatgcaataattttttttgaggggcagagccttgctatgttgtccaggctggagttcagtggcatgatcacagctaacagcagcctcgaactctcaaaactcttgggttcaaaggatcctcctgcttctgcctcccaaagtgctggtattgcaagtgggagccgctgcacctggtctcaataaatagtttttgaaacactgaagaaatatgacataccaatttcctattcatttttacctctccagaaattctgtctaattcattcactgtctctaccttcaagttacctttgttctatgggatgactaaaaaactcacacacagctctatattctgctaccaaaaccttcaaagcggccaggaatccagcagagccatattctcaccttcattctctttctccttagatcttgctgtcctctgcttacctaccctacagatcaattttatttttactttttcattttttcctacatagggtgctcctcagctacttctgtcattcctattagatatctttatgattcaccattaatagtttcagtaatatacacaatactcaaatgttcttcgcaaataacctccattctccttacagatggtcgctgcaattacaggtgaagtgataaccacttcccagcaaaaaggtgagatcagggagttccaaatctttatctcaggttcagatgtcctttccacacctgtacagatgccgtcactccatcattctgacaccagatgccaagtgagtaactcatgcttttcaagtaagtttcaggtccttagatggaaactatctcagaaaattcagtattaattgttctctgtaaaacatttctgggtttggaacacgaaagagtttatatagcaggaaggtcatttgctgagaaaactagacacacatagcatcctgtctatatgccacagataaagacttgatgctacagacatgttaagaacagttagatgacaatggtaagctcttggtactgtgcagatacctggtgtctgtgagagaggtgctgatatgtgcatttcttctgtgaaacagcaggttgtgcaaactggaatctgtaatgtctccacattctgtcatcagcagaagactctgaacatttttctaccgtttaaatgagtctcaattatccaatttataataatgcaaattttacttacagataaatatgggggagtagaggagggttgtgagtttcagccatgaaaaattcatggagcttaaaaattcctaagtatctcaccctgcaaacagataattatatttctaaaagtgtcttgacattctcattctcatgtactcacagtactcttctctatcctcaaagtttctgaattgcttctctgttcctgtctcctctgttattctgcctccctcctcccttccttgcctagtttaagtggatttttagcaaacaaaagtgttgactagaggctgtgagtgaagggcatttttacctcccctggcccccagtgtagattcctcttctgtctacacagaatccttcagatcaggataaaattgagccttccttactagttactacgatttttgaagaattggtgtgattgataaccacagcaacagtgtttggactttagagaaactttattcatgcccacactatgtctactgacctacattttgttacttaaattcattttaagatttctcttccaaaagttttccagttattctcctcttttgattcattgatcccctatatttttattttaccagtaatttcataacttctcttaatattaaaatattttaatgaatatttggaataaacgtatgtgtctatggtgaatactcactgggacacactatacccctccttcttccacaacctcaacctaaggaaggaacactgtctacaagtggtgaggatccttccagatagatttccattaatttacataaattttgcaagatctcccttaactcacctctgcttgacttactgctgagtaaattctttctccatattcccttcatgtaacgtgctaatcagtgaccataaatcacacatgattgttactggtagaatcaatgctttcaactccaacacgtctgtctccacaggttgatgtatatatttatcaacagggagttttctcctcccaaaagtaatgccatttgctctatttattcaatggcataagtggtttactgtaataaaaactactaaactataatcacaaaaaggaaaactttttatttttataaagcctaaataaaatgtgccagaaacaaaaattagagattctttaaaaatgctattgaggtaaaagtgagtgataaaagtagacctgtataaatacaagtctgtgaatattctgtactcagaattttgacatctttaagtgttttagcttactttaaagaactaccatgctgggcgcggtggctcacgcctgtaaccccagcactttgggaggctgaggtgggcagaaaatctgaggtcaggagttcaagaccagcctggccaacatgataaaacccgtctctactaaaaataaaaaaattagctggatgtggtggtgcacgcctgtagtcccagctactcaggaggctgaggcaggggaatcacttgaacctggaaggcagaggctgcagtgagctgagattgcaccactacactccagcctggccaacagagcgagactctgtctcaaaaaaaaaaaaaggaaaagaaaaaaagaactgccaattgtaaatttgtaaatcatgtttaattatagtttatgatagaaaataaaagaaacataaaatttcttacagaagaatttaacccataacaaagtttgagcaaagtaatacaagctacaattaaaataagtcatttcaatttcatttgaatgtgagccaaacattttatgtttttatttttttctcaggattatatctttttatatgttgtatttttttcttttatctggctattaacaatagtaaagtgattgataactttctcttttacattctatgtatttaaatatcttatttagattattttaatttgcaattatttttcattaatatttcattttattaaaaattgccttttttcagtgtttacatattaatggcttacttatccaagattgtaaaaatatacaaatatttttaccgctgagagatttggttttttgtttgtctgtttttgttttttgagagggagtctcactctattgcccagactggagtgcagtggcacaatgtcagctcactgcagcctcctcctcctggttcaagtgattctcctgcctcagcctcccatgaaactgggactacaggcttgagccaccacgcccagctaattttcgtatttttaatagagatgggtttcaccatgttggccaggctggtcttgaactactgacctcaagtgatccacctgccttggcctcccaaagtgttgagattacaggcgtgagtcactacacccagcctaagactattctttactttgggttttttgttgttgttgttgtttaacaggctgtcatttgtcacccaggctggagtagagtggcacgatctcagctcactgcagcctcaacctcctgggttcaagagatcctcctgcctcagccccttttctgcccctcaccccccacccccaatagctggaactacggacgtaccaccacttccagctaatttttgtactttttgtagagactggatttcatcatgtttcccaggctgtctccaactcctgaaatcaagtgatccgcccgcctcggcctcccacagtgctgggattacaggtgtgagccaccgcacccgggattgttattcttcactttgaatcccacatgttatttaaagctaagacctgaggcaaaaaaaaatcacttctatatttcaactaatactattttattactaggtaataagtcccaatatttacatttatgtacacatacacacacatttcctttctataccattaagataatggtagacctttatgtcaggaaaatgctataggctgggggcgagtggctcacgcctgtaatcccagcactttgggaggccgaggcgggaggatcacttgagcctaggagttcgaggccagtctgcacaacgtggtaaaaccatgtctctaaaaaaaaaaaaaaaaaaaaaaaaaaattagctgggcgtggtatcatgagcctgtaatcccagctactttcagctactcgggaggctgaggtgggaggatttcttgagcctgggaggcaaaggttgcagtgagcccagatcccaccactgtactgcagcctgggtgacaagagtgacaacctgtctcaaaaaaaaaaaaaaaaaaaagctattggtaattgaatttatctttattgaacaaatcctcttcattgcatgctttaaattttgatttgtttaaattttattgaattgtaataaaacgattttgaaattactagagaagcccaggcgctgtggctcacgcctgtaatcccaccactgtgggaggccaaggcaggcggatcacctgatgtcaagagttcgagaccagcctgaccaacatggtgaaaccccgtctctactaaaaacaccaaaaaacaattagccgggctagctgaaggcacctgtagtcccagctactcaggaggctgaggcaggagaatggcttgaacccgggaggcggaggttgcagtaagcagagatcgtgccattgcagtacagcctgggcgacagagagagtctccgtcaaaaaagaaaaagaagagaaaagaaaaagagaaaggaaggaagggaggaagggaggaagggaggacgagaggaagggaggaagggagggagggaaaagaaattcctgggcagatgaaagtgaggggtcgggggtcggggtcgggcgcggcgatgccgcagctgcggggctcggtggactcggcgagcaagagccccaggacgctgctggcggcgggcgaggagctggggcgcggcgcggggcggctctaggcgctgtggccgctcagcgtctgggacccagcgccgcccaggtcagggaatccttggtgttcccgccccgcagcacccggggcgggggaggagtcggcgcggtcgtgcggccgtggaggacagcgagacccggggctgcggctgcaggccgaggggcccctgggacagtgagaagcagcggcgggagctagtcacggggcagggagcgctcagcggtaaagacggcttcatctgactccagggctggcaggcggcccggatggcatgccgtctcctgcggagaattccaatttccccctaaatcgctcaacaagcgagaaggttttgggattcgaattcagtggggcaagcgaagtcgcctttccttcttaaacagatggaatccctggtccacaaacgtaccctgtgccaatttcatacaacacgctatggctgctgcggatgagaacacagcaactctgccagatgaaaagcttcaaggctctgtgaatccaaggtcaaaaacgccaaaaaggaaagtccttttccaggacaagcgcacgcgtgctggtcgtggagcgccccctcctcatggagaccggcctgggattgatgtccttcattaacaatgaggctaaactgggctattccatgactgaccaggggcaaaataggcttttagccagcggcattctgggagctctccccactaagaaggccaagggatgtggggtctgagagcctggcagtcctcatgcaaagccgctgctggctggaagcataggggtcttttaccttttgggatctctgcacgattagaatagtaaagtggatagtaattgcatattgcactctgctaatgcaagctacagacaaaagcaaaaagaatctagctgccactgtgctgctaggattccattttctgtaacttcagttctgatacttttcctggagtgtatctacttggcttctggcggttcttcccatcccagccactccagcaggctaaatcccgcagcacaccccttaccatttgtgtaggctgctaaatacagggaggcacctggtatctccagtgtctgcagacacaaatatgtttacacttggtgtcaaattttgtattttaaattttaatacttttttttttaaagctcatacaaaagcagccagcagacaagttcactgacatcagtctgcacctgtcagctcctgggtgaatcattgttcttttgtaaatgtgtgtttgacctaaagtcaccctttttctaaaattaatccaaggccgggcgcggtggctcactcctgtaatcccaacactttgggaggctgaggcgggtggatcaccagatcaggagttcgagaccagcctgaccaaaatggagaaaccccatctctactaaaaatacaaaataagctgggcagcccacgtcagtaatcccagctactccggaggctgaggcaggagaattgcttgaacccgggaggtggaggttgtggtaaaccgagatcgtgccactgcactccagcctgggcaacaagagtgaaactccgtctcaataataatactgatacttaaaatatctttgcgaggcccaagtaggtttacagaaaatcatcttaggacaattttttaatttgagaaagtcactttggcagttctttgcacacaattttgacaagtgtatgtattataagttgtattgtattcatatttaaaaggaaattgggtagtttgccttttgaagaatgcgctttttaaaaaggaaccatatcagatccttatgaagcagccgatgcctgccatggttcctacaggtcctgtacagactcggggctttgtccaagtctccactaaacatgctaagcttcgatgcgccctggagaatttccacggggtgatccacgcacctccatgagatcctgcagcttgcttgtatgactggaagcattggataagcttcgcgtgctggctctccagttctttccttctctttacgactgttgtagcttttagctaatggagtggtgcggtccaagtgcggccacctacgggaggtgcagggctgcctcggaagctggcaggggaccccagtctttgcgttcataaagacatttagaaccggatgaatgttgttccttttttgaagttgttattaaagtaggtgcaacaaccaaaaatcaataaataataaataaattgactaaatattttttctcaaaaaaaaaaaaaaaagaaaagaaagtcaccaggtgtggtggctcacgcctgtaatcccagcacctggggaggctgaggtgggcggatcacctgagatcaggagtttgagactatcctggccaacatggtgaaaccccgtctctactaaaatacaaaaattagccgggtgtggtggcgcatgcctttaatcacagctactctgggtgcggaagttgcagtgagccaagatcgtgccactgcactccagcctgggcgacagagcaagactttgtctcgaaaaaaatagaaagttaacagttttgtttattttcctaccaggtttttattattattattattattctaattgaaatcactgtttcctacatactgaggcggattggctttgtcttcttggaaacaaaggttattttcctcactcacactggagcggggatactcaccagacacaagttgagatgatgctggatgtaaacgggtcatctatttttaccaaaggcagcactacctgccttcccaattgatcagaaaagcatttgatagttgtctttgtaatatccttatttgattaaattactatgtggatttcacatttatttttattgttttgtgcctgtttattctatgcctaagttggggtatcaccaggtcatttcctccaccatctgtgtttccccaaggataaatcctcctgctcatgcccttcactcctccattagcccattccctagaaagctgctggttttacacagtggctgtgtgtctttgccttcttaatgtagcattcagagtcccactctggagccaggtatcaaatcctagcccagccacttacaggctatgtagcactggccaaggtactgaacttctctgtgcctctgttattttgatgttaaaatggagttatttaggatctactttacaggactgttgtgatggaaatgggttaacatacagaaagcactgagaacagagtcaaatatgccctgactgcttaaaggttagttattatgatccctgatgctattactactcttactgatatcatcgtgcctcaggtctaactgctcccagagttacacaccagcatgtccaacagctggctgtatatctgaactcaaaaatccaataacctcctccaaacagaaattgccagcttttccccaaaccttttccttacagctccttacagagctcaaggaactccttgagactgcagaagcagacaggaaatgctttcaacccaccacaaattaacaactggcctccagtggtactcacattgtctacatttttcattgttttttttttgtttgttttttgtttgtttgtttgtttgtttttgagacagagtctcactctgtcgcccaggctggagagcagtggtgcgatcttggctcactgcaacctcggcctcccaggttcaagtgattctcctgcctcaggctcccgagtacttgggattacaggtgcctgccaccatgcctggctaatttttgtatttttttagtagagacgaggtttcatcatgttggccaggctggtctcaaactcctgacctcaggtgatccacccgcctcggcctcccaaagtgctgggattacaggcatgagccactgcgcccagcccatttttcattgttgtagcagagaagtatccctgcttccatcaagagccaattttcctgtcacagttggtttaatgacatagttggtgacaggacctaaaccaccagtggaaaattggctcttgatgggagcagggatacttctctgtatggagtatatgtggatgaaactccttggagaaatggactagtacacagtcttataatgtgaggattcagaacataattcctaatgtggggaagtcaagcagacatttcatcagtggagtaccaggagattcaaactctgtacccaacagtgatagggggacaatctaagccccaagaggctgcatgcctgatggagcagatgaaacacatggctgtaattagctcccaccccttcgatacgttctcaactccaccaaagcctcagcctgtatgagggtggaaagtggggagggagagtgcagggaagaaggcacagcttccaccacactaggtgaccaggcgcttctcaccattttaactcctccatctctctcaagcctcatgttaagtctatcaaacatcatatgctttctcaatataaaatatgcaccaatttctccctttccactgatataatcctagtctcaacccctgtcatctttttgatggattaggaatgccttctctgggtcccgggccccctctgtttcaccagcctggaattggcacaggagtcacagcattagccttgccctctgccacccttgtaattcataaatctctgaaaacttaaaagtttgagcaaaagtttgtcatgtttctatgagtaatttataataaaacttgatcagaatttgtgagactaacgtttgtctttatattttccttttttttttttttttttttgagacacagtctcgctctgtcgtccaggctggagtgccgtggcgtaatctcggctcactgcaacctctgcctcctggattcaaacaattcttctgcctcagcctcctgagtagctgggattacaggtgcatgctaccacgcccagataatttttgtatttttaatagaaaccgggtttaaccatgttggtcaggctggtctcaaactcctgacctcatgatccacctgcctcggcctcccaaagtgctgggattacaggcgcgagccaccacacccagcctgtctttatattttcatttaatgtggaccttgttacattttaccgcagattttgtatttttgtgtgtgtttgtttgtttgttggtttttgagacagtctacctctgtcgcccaggctgcagtgcagtggcacaatttcagctcactgcaacctccgcctctgtggttcaaacaattcttctgctcagcctcctgaatagctgggactacaggcacgcgccactacgcctggctaatttttgcatttttagtagagatggggtttcaccatattggccaggctggtctcgaactcttgacctcgtgatccgcccacctcggcctccaaaagtgctgggattacaggcatggttttttttttgttcgttttgttttgttttttttttagagacttggtctccttccatttcccaggccagagttcagtagggcggtcataatccactgtagccatgaactccctggctcaaacaagctacacagacatgccaccatgcctggctaacatttttaacattatttttggtagagacagggtcttgctttgttgctcaggctagggattcacagagtcttgctctgtctcccaggctggaatgcagtggcgcaatcttggctcactctagcctctgcctcccaggttcaagtaattctcctgcctcagcctcccaagtagctgggattacaggtgcccaccaccatgcccggctaatttttgtatttttagtagagaaagggtttcaccatgttggccaggctggtcttgaactcctgatctcaggtgatctgcctgcctcagcctcccaaagtgctgagattacaggtgtgagccactgcacctagcctgcagaaatattaatgtgtttgtttatgacctgttgacccaggaccagtgatggtatagaacactgtattagagacatggagctggggctggatgaagattccatcagtaattcaatcaacagacaagtgttatccaatcacgtctttaaatcaatcactgacatggagctggggctggatgaagattccatcagtaattcaatcaacagacaagtgttatccaatcacgtctttaaatcaatcactgatcccagcccctataaaagggagcagccttaggaggcacatcagataaacccagtgtggaaagctagtcacacatcagctcagtgttcggcccgggattacccagtcaaccaaggaggtaagcttccataatggaaggaaaattttgtgcctttgagtgtgtatacattttgtgtctttgagtgtgtatacataattttgtgtctttgagtgtgtatacatgtgtatgtaggcatagctatttcaggaaaattcctaactacagagatatgggggtctcccaggtgtagggaatggtcttttgttacaacagctctgacccaaaagggcttgatgttgtgaactctgtataaaggcctggtgtgactgaagatttttcttcaaaaagtctatcgtatgactttatgttctagtaattcttttttttttttcgagacaagatctctatcacccaggctaaagtttagtagccccaatcacagctcactgcagcttcagcctccccaggctcaagtgatccttccaccttagcttcctgagcagctgggaccacaggcgcacaccaccacaccaggttaatttttctattttttgtagaggcaggattttgccatgttgcccagtgtggtctcaaactcctggcctccagtgatttgcccactttcagcctccaaaagtgctgggattacagatgtgagccactgtgcccagcttagtaattcctttgtattgcattatatgaaatatgtagctgggtgtcattagagatcataaagcccaggatacagacccagacctgacgggtagcatgcctgcgtcacagtttgtaattgccagactccagattagagctccggtagccttgttttgaattcccaggttctgggaaataagccataatactttgcagtcttgtctatgtgggacggagtgcatgtctccaagtgtgaacatgtggtctgtgtgtcataggggagaaagggtgggtaatccaaaaagagaacttggagggaagtgaaatgaaggggaagccatgggttccacaggaaaaaaaaaaaaaaagagagagagagagaccaatgtccctggatatagagaaccagccacaacacctaagatggagcttgagaagtgtagagctggcccaggaaagcctcgtaggacaaggactcagtgcttttccctgagggcaaaggggagccatccagagagtagagtggggtatgatgtgagcagattagcattttataaacgttgactggaagcattatgacaactgggttagggaaaggcaagaatgtgttccattgtctcctaggagattttaccaggatcacctctgccttattaactgatgcgatcagggtagcagatctggtctaatcagaccagatgagattaacacaaagcaggaaataacattaactaacagaaatcagttaggtttttgtgtgtccacgtattactcctaccattttctgattttatggcatgaaatttgcttttttcaaaattgcacaaatctttgaaatgttaaccatatataaaattggagaaaaaacacaaaaatagcaatgatatattaacagaaaagggattaaattctttatccattcaggatttcaaagggtgtgtctctagttgtccagataatctgatttgggattagaaatcaatttcaagcaatgcaaactcacttttacttctgaatcctaaacatcagtaggaaaggacagggagtaaaaacagataaacataaaatagtagctttggttaaagcagtaaagttctaaggaatggtaactgttaatgggaaaaaaattcaagcagaaaaggtgctaagaatgtttcctaaggaatgtatcctttcacaacacagtgggtgtagctggtagtggccttgcagatgtctgtgcctaataagttttcagccagagaaaggtgtcatttgtatggattctggcttgtcttttctatttcattcacttctttctctttttcttgttttccctagctttattgaggtataattgacaaagattgtatatatttaaggtgtacaatgtgacacttctctctctatatatatgtatactttgcaaaatgattaccacgatcaagctagttaacatattcatcacctcacatagttatcttttttttttttttttgagacagaatcttgctctgtcacctaagctggagtacagtggcgtaatctcagttcactacaacccccacctctcaggttcaagtgattcttgtgcctcagcctctcaagtagctgggattaccggtgcatgccaccacacccaactcatttttgaatttttaatagaggtggggtttcaccatgttgccaggctggtcttgaactcctggcctcaagcgatatgcccacctctgcctcccaaagcactgggattacaggggtgagccaattatcttttttatatcatgagaacactgaaaatctagcaaatttcaagcatacaatatatattagctatagccaccatgccgtacatcagatctccagagcatattcattttttttccctagcctgagaaggacatggtgacatttaattaattaatttatttatttatttattttgagatggagtttcactctgtcgcccaggctggagtgcagtggcacgatctcggctcactgcaacctccatctcctgggttcaagcgattctcctgcctcagcctaccgagtagctggaattacaggtgtgcaccaccacagccagctaatttttgtatttttagtagagaaagggtttcaccacgtctcatctcaagtgatacgcctgtctcggcctcccaaagtgctgggattacaggcgcgagtcaccgtgcccggccacatatttattttataaatgaaagtttgccataggcatagtagctcacgcctgtaatcccagaaaggctagagtgaggagcagtcacttgagtccaggagttcaagacaacctggacaaaatagcgagaccaagtctcgaaaagaaaatttttaaaaaattagctgagtgtggtgcgtgcctgtagtcccagctactcaagacgctaaggcaggaggatcgcttgaacccaggaggctgaggctgcagtgagctgtcatggcaccactgcactctagcctgtctgacagacggagaccctgtctcaaaataaatcaagtttgcaccatttgatcaacatcttcccatatgccccaccccatgcccctggcaaccacccttctactctcagtttctaatactttattttctgatgatgatgatgattattattattattattattattgagacagagtttctgtgttgcctaagctgaagtgcagtggcccaatctcaactcactgcaacctctgcttcccaagttcaacccattctccttgctcagcctcccgagtagctgcgattacaggcatgcaccaccacatctggctaatttttatatttttagtagagacggggtttcgccatgttggcaaggctggtcttgaactcctggtttcaagtgatctgcccgcctcggcctcccaaagtgttgggattacaggtgtgagccacagtgaaaagagtttttttgttttaatttcaactgcttgtgataacacaatattacaatattcagttcattttggtttattggcattgtaatagacatctccctaaattcacctaggctaatatttggtgaatattttattttattttagattcagggagtacatgtgcatgtttgttacaaaagtattctgcatattggtggaaattggacttctagtgtacctattacttaaatagtgaacattgtacccaatgggtaatttttcaatacccatttccctcccaactcccccgctggagtccccagcatctgttatttccatccttatgtccatgtgtacccactgtttagcttctacttataagtgagaacatgcggtatttggttttctgtttctgagttagttcacttaagataatggcctccagctccaactatgttgctgcaaaggactaatttcattcttttttatggctgcataatattccatggtatgtatttcacattttctttatccagtcaaccactggtagactcttaggttggttccatgactttgctcctgtgactagtgctgcaatcaaaatatgagtgcaggtgtctttttttatataatgatttctttccttttgagtagatactgagctggatcaaatgatggttctatttttagttctctgagaaatctccatactgttttccatagaggttaactgatttgcatccccaccaaatttattgaatactctttgtaaacaaaatcaagactctataaatatgtttgaaatattttctttccttatttcactggttagggagcaatccaatgtttcatagagatgatagctcaagcagaaaacttttaacaataaattttgttgtaactactttataaaatatttttcacatcaagttttttttttttttttttttaagagtctcactctgtcacccaggcaggagctcagtggcatgatcctggctcattgccacgcccacttcccgggttcaagggattctcctgcctccaccactgaagtagctgggtttacaggcacgtgccaccatacccagctaagttttgtgtgtgcgtgtggcttttttttttttttttttttttttgagacggagtcttgctctgtcagccaggctggagtgcagtggcgcaatcttgactcactgcaatctccacctcccgggctcaagcaattctcccatctcagcctcctgagtagctaggactacaggtgcatgccatcatgcctggctgatttttgtatttttagtagagatggggtttcaccatattggtcaggctggtctcgaaatcctgacctcaggtgatccacctgcctcagcctcccaaagtgttgggattacaggcatgagcaaccacacccggcaagttttgtatttttagtagagatggtgcctcaccatgttggccaggctagtctcgaactcctgacctcaagtgatccgccctcctcggcctcccacagttctgggattataggagtgagccactgtgcccagccaaggatatttcctaatagttctagtttattaagtgcctttttcaggaataaacattggcatttaaacattttaaatgcattcattgagatgattttattatgttcttgtatccatatcccgttaacgaagtaaattgcattgatttttgaattttaacccaaacttcctgcattttggaaatgaacaccatttgcgatgtatatgtgagtagattttattttcaaatattttgttttggataattttaatgtatttgtaaaattttgttatcaggaagtgctgacctcagtaactaaagtgggtagtgcttcctcttatatgctctgggagagtttatgttaagttataattatttctttgaattcatccatagagccatgtaggcctaactttttggttgatttgtctttaattatgccagtggtgcaattaattactcatctcttttctatttctagcttgcagttttaaagaatccaccaactgttgaaacaaatccctagagacacaaggcaagagactgaatcatcaaagtaaagtctctctgagaattattgctaagaatggctttagatctaagaaccatatttcagtgtgaaccatccgagaataatcttggatcagaaaattcagcgtttcaacaaagccaaggacctgctgttcagagagaagaagggatttctgagttctcaagaatggtgctcaattcatttcaagacagcaataattcatatgcaaggcaggaattgcaaagactttataggatctttcactcatggctgcaaccagaaaagcacagcaaggatgaaattatttctctattagtcctggagcagtttatgattggtggccactgcaatgacaaagccagtgtgaaagagaaatggaaatcaagtggcaaaaacttggagagattcatagaagacctgactgatgacagcataaatccacctgccttagtgagtacagggttctaacttctgggatgagagacaaaggaaagtaaggaataaatcacagtcagttagagttgtctggaagttagagaagctattggaggtccagttattagtcagctcacactctcccaccattctcacaaagaataatcttcaatgtcctaagttctcaagaaaaaaagcaaaaaggtatatatctgtttattctgtaggacatataggagccaaacatattgatgtttgattaacttaattttagtctgcataatggcagactctgagaaattgactttttggcatgatatcagctcactgcaacctatgcctcccaggcacaagtcattctcgtggctcagcctccagagtagctgggattacaggcgtgctccaccaaggccggctaatttttgtatttttaatagagacagcgttccaccatgttggccaggcggtctcgaactcctggcctcaagtgatccgcctgccttggcctcccaaagtgctaggattacaggtgtgagaccagcctgaaattgacatttaaatgaagacatcaaggttgaggaagaaatgtcttgacaagagcttgttcttctgtcagggaactctaatcaagaaagacattctaaagaagcaattacggtagatccttattctcagagcccatatttgcaaaattgctaaaatttatttgtaagcttaaaataaatacctgaggcatcttctccgtcattttcagatatgtgcaggtggtaaaatatttgatttaccttaggtgcatgtttccaggtgaggttgaacaaggccacaacctcacttcctattttggttcctacagtgtaaataagtgtccttttcacagtctatttagtggcacatttttttttttgctttttattgataactttgttgtttaaagtgacactgaagtaaaatgctgaaacactgtctagtcttcctaagtgcaggaaagttgctatgtattatggagataatacatgtgttggatcctctgagttcaggattaatcaataatatatattaaatggggtgtctttgaacatatacacacataaaacaaactcatgtattgatcagttgacaaaaataatgtagccagaagctcacaggaaactaaccctgaatttttcctaggggaaatgattcagtacttgtaaattcaatgtccatgtgactttattaaacataagagcttgtagtaacaagaataacaccatcagagatggtggacaaaatatgtgatagccaatacttgagggagcttgtgagagcctgttaaggaccacttttccaaaaagtcttctgttacacaacagattcagatacaacagtgatctggctttctttacaggtccacgtccacatgcagggacaggaagctctcttttctgaggatatgcccttaagagatgtcattgttcatctcacaaaacaagtgaatgcccaaaccacaagagaagcaaacatggggacaccctcccagacttcccaagatacttccttagaaacaggacaaggtaagtcaggtgaatctgcacaactgaggagtgttctatgtggaccccttcttaagtacaacttcattgagtgtctattttcacaggatatgaagatgaacaagatggctggaacagttcttcgaaaactactcgagtaaatgaaaatattactaatcaaggcaatcaaatagtttccctaatcatcatccaggaagagaacggtcctaggcctgaagagggaggtgtttcttctgacaacccatacaactcaaaaagagcagagctagtcactgctagatctcaggaagggtccataaatggaatcactttccaaggtgtccctatggtgatgggagcagggtgtatctctcaaccagagcagtcctcccctgagtctgcccttacccaccagagcaatgagggaaattccacatgtgaggtacatcagaaaggatcccatggagtccaaaaatcatacaaatgtgaagaatgccccaaggtctttaagtatctctgtcacttattagctcaccagagaagacacaggaatgagaggccatttgtttgtcccgagtgtcaaaaaggcttcttccagatatcagacctacgggtgcatcagataattcacacaggaaagaagcctttcacatgcagcatgtgtaaaaagtccttcagccacaaaaccaacctgcggtctcatgagagaatccacacaggagaaaagccttatacatgtcccttttgtaagacaagctaccgccagtcatccacataccaccgccatatgaggactcatgagaaaattaccctgccaagtgttccctccacaccagaagcttcctaagctgctggtctgataatgtgtataaatatgtatgcaagtatgtatattcctatagtatttatctacttaggatataagatataatctcctgattatgctttcaatttattgtcttgcttcattaaaatgtaaggctaaggagagcatggaatttgtcagttttgttcactaaagtattccaagtggttgggaaagtggaacatttccaagaaccaataaatttctgttgaataaatgaatgaatccataatgttgatatccttttttaaaaaaagagatggggccggccgcagtggttcggcctcccaaagtgctgggattacaagcgtgagtgaccgtgcccggcttttttttttttttctgagtcagagtcttgatctgtcgctcagactggagtgccgtggtgtgatcttggctcactgcaacctccacttggaggtccaaaattaatcatagacaccaaaccacagatccagaaatctcagagaagaggaagcagtgtaaataccaaaaacctacaactaggtacatcatattcaaactacagaaggccaaagatagagaaattcttgaaagaagatggaggtgggagagggcactttacctgctgaggaacaaggatgagatttagagtagaattcttgtcagaaaccagataatcaagaagggaatggagtgaaagttcaaaatttagtacaaaaaataaaaccccaccctaacatctatatccagcaatgttatctttcaaaggtggaggagaataaagcttttctcacacaaatactaaagaattcatccccaaaggtcctgttacagggtccctgcattacatgtgaagcaatccagtagttatttgaaggtcgaattagattaaagatgtttaggctgggcacagtgtctcatgcctgtaatcccagcactttgtcaggctgaggcgggcagatcacttgagtccaggagtttgagaccagcctgagcaccaaggcaaaacctcatctgtacaaaaaatacaaaaaaacaattagctaggtttggcgacatgcgcctgtaatcccagctatttgggaggctgagatgagaggatcacttgaacctgggaggcagaggttgcagtgagctgagaacagaccaccgcactccagcctgggtgacaggctcaaaaaaattttaaaaagatgtttattgtaacttctaagggaggaattaatatttttttttttttttgctggcaactttgattaatttaaacatacaaaaattagctgggcatggtggtgtatgcttgtaaccccagctactcaggaggctgaggcaggagaatcgcttgaacccgggaggcagaggttgcagtgagctgagatcgcgccactgcactccaccctgggagacagagcaagacactgtctcaagaacaaaaacaaaaaagcccaggcgcagtggctcacctgaggtcaggagttcaagaccagcctggccaacatggtaaaaccctcgctctactgaaaatacagaaattagccgggcatggtgctggcgcctgtagtgccagccacttgggaggctgaggcagaagaattgcttgaacctgggaggtggaacttgtggtgagccaagatcaagccattgcactctagcctgggcaacagagtgagactccgtctgggaaaaaaaaaaaaaaaaagaactgataaacaaattcacctgtgtagctgaattcaaagtcaacatgcaaaagtcaacatgtaaaactcatatgcccttccatacactaacaatgaaaaatctgaaaaggaaattaagaaaacaatatcatttgcaatagtaatgtatatggtcaaatgatctcaacaaggctaccaagaccactcaatggggaaacgatgatcttttcagcaaatgatgctgggaaaatgaaatattcacatgctaaggaatgaaggtgaacccttacctaacaccaaaaacacaaatgaactcaaaatggactaaaaacctaaacataagacccaaaactataaaacacttaaaagaaaatatagggtgaaagttttatgacattgaatttggccataatttcttggatttgacaccaaatacacatgtgacaaaagaaaaatagaccaattagacttcatgaaaattaaaactttagtatatcaaacaataacaaagtgaaagaggaacctatttaatgagaacaaaatacaggttgaatatccctgagccaaaaatctaaaatccaaaatgctccaaaatccaaattttttttttctttttttttttttggagacggagtctccccctgtcgcccaggctggagtgcaatggcgtgatctcgactcactgcaacctctgcctcccaggttcaaacgattctcctgcctcagcctcccaagtactgggattacaggcgctcgccaccatgcccggctaatttttgtatttttagtagagacagggtttcaccatgttggccaggctggtctcgaactcctgatcgcgtgatccacccaccttggcctcccaaagtgctgggattacaggcgtgaaccactgcgcccggcccgcccgactaatttttgtatttttagtagagatggggttccgccatgttggccagcctggtctcgaacttctgacctcaggtgatccgcccgcctcggccttctaaagtgctgggattacaggcgtgagccaccgcgcccaaccccctgaaataatatttgtttgcctctaggggcaccctgagcttcgtggagtctgaaataatgtctctaaacacttaagtgatcagttacggaaaacacttcccagaaatctgggaaaagcccctttaagaaggagtaaatacctccttctcccctagaggccgaagtcgccatttccctgcacggggcacagcacctcagaatacaagttcgcagaggtcaaagcagtggacacactccgaagagctccgtggagttttggaaactacattatccagagtgcagagcgcaaaacggcggcggagttgagccaatgacagcccaggatagcaacacttccgcgcacgcgcagcgcgacgggccggaacttccggcgtcctcctcgtggcggtcattttggcctctgtcctgtttgtccagcccgccagtttctgcagtggaggtcgcgactgagggacgggacagagaagtcgcgaaagtgggccagaggttctgcgacaccacctcgggtgagctgcgccaggcccgggatagggactgttgtgttcgaatgcccgccccggtcggccgccgctccccgcctagtccacggagctcaatggcggcagtcgcgctgagggactcggctcaggtgagttgtgcgtcctccgggtctcgcctacctcccccagcagaagccttaaggcccagtgagggatgcctgctcacagccctgcagcccaggccccagtaccctggacaagaaggcgcttgtggattggacccgtttgtgacgcccagtgtgtacggaaatgtgacgggcagttgactggcgcgtgcagaacttggagctgcgactaagctgggggggattcaggagcctggggtccgtctcgggtctgcaggaacatagagtgaggcagagttgcacctgacgaatttgacgattctgaggacactggcagccttcgagatttgtgaacagatagggacactgggctaggatttcctaaagctatccaaaagttgctcaggggaagaacaggctgaagagaggtaatagtagttaggcataggaagactgagttcttgtccaagctcacgcagctggtaaagtcagcactgagaactgaggtgcggagatagtgcagccagcccaggccacctggctccaaaactggaccagggtcattgggcgacctgagcctcgccactcgtctagccttgggccctgagactttgagcaaatacaaagcccagagtcttaagtccaggttagattatatgaagctgttggcagccgggggaaaggagatgtagaaggttgtccaaggcaaagttaccagtatatgctaagtttggagaggaggctaagatagttcaggaacctacaattattttcttttcatgagaacagggagcagtgtagtagaagtcagacccggaatggttccctgagaagttgagttgtctattcgttacttaatagtaacagtgggaggtttggagtggaagagggaggtgatctggttctggtcttattaggctccctgtggctgcagcatgggaagccaactgaaggatgaggtggggagacctgggaggagactactgggataggccaggtgaatgtgatagaatgtgataggccaaaatggtggctgtgaagatgcgagaagcagttggattctggattcattttttaagtagggctgcctgaatttttagttttgagaaagagagtggagtcagggatgactgaaaggttttattttggcagttagaagtgtggaagctccatcaactaagatggggaagtacatagtaggagtagttttcatttgggatatcagaagttttatttttgacctgctaagagtatgagagctttcagagaatggttcatgggctgctggaactgtaggtcaggaacagtgaggagagattcagaatggagacttttccaaaaggtagtggacaatctgtgggccggggtggagctgtggatcacatttagtagaggggaagcctgctcacaatgataataatagttgtcaaggaaggggaggggaaggtcaaggacaggtctcctgtgtgagcccctggttgtgtgaggtgttgcaacacaggtcttggacagaagtgttcacggtgagggtcgtacagagattatgatctagcatgtggccaaggcttctcaggggtgagtagacatgagatgaatgtagaggcataggagttagacaggatgatgctaggactggtgcgtattcacctctctgcagactgaccagggttttatattaactcttggtgggatctgggaagtttcagtcaggctgtcacgttatcttaggggcataattggccatctgtgggactcgatgggcccggggtagagagccactggggttggaccttgaattagtggtagttggagagaggaaggctgtgactggttgggggacagcaatcacagcccagaagtggaagaggccttggttatctgagatccacaggtgattcttgatgggtgaggttgaagcaaggaatagtcaggtagaaaggccttcatggtatgacttgaggctgcccctaactttaggtgcagttagagatctgggatagtactgaaccgtatttgaatttgccagccactctctgggccccatatgctgagtaaccagttgggaggccaaggagatgctcatggtatgaggcaggaagtaagctgtggctgtgggagtgacactgtgagagaagtgtggtagagtattgtgcacatggagacaagaatgtgaagtggtggctccttggtgttgaggacacaagggtgaagtatgaaccaagacccttggttgtgtttgggagccatggtctgttgtcttccaggagagtttccttacaagagagtatggttccttgcatggcaggctcagagcttagatacttgcccacctgcctgttgttgctgtgggagaacacaatgaccaatgggaccataaggagagagggggcattagtgtcaccaggccctgttgcattctttcaaatgagaagatggagaggaggatgaacaggggatagatgcagcagggatgaatttggggtcctaggagagatactcataatggaatgaactgtcccaatcatggaaaagctgtgtgacctttgaggttgtggctgtgggaatgcagctgtgtgagacaggtgtggttcaaagagtgatgtacatgagaagagagagaataaactgagggccatatgggtgaacgggagtcagaggggtaaagggtaagcccgtgttagttgtgtcttggaagatcaatcttggggacttcacgggtattgcctgacaagacaaacgtcagatcactcacaccctgtctatggccagttctctctctagctggtgtttgtgagtaacgagaggtatagcctacctgccatgcccagagcttagatagcatctatctgttcataggcctgttgttgctattcgaggactcagtatcagtggaactgtggggagagggtaggcatcggtggcactgtggctggttatctccgctgaggtgggcaatagggtgacctggggatggatgttgggggcaagaggataatgaactccgggtctgatcgtggattgaactattcctgctgtgacagggtatgacctttgaggatgtggccatttatttctcccaagaagagtgggagctccttgatgagtctcagaggttcctgtactgcgatgtgatgctggagaactttgcacatgtaacatccctgggtaaggccctagcatccctccgagtgtctgcttttctttttgaccccagagttacctctgtctcaggagtcttgctgtcagcctagtggatcttatttttcttgtcttccccctgtcaggatgactgtgtacagattcatggtaccttgtggcccagtttctgcccttttcctctagctgccatttccttatgtccacctatatcagaaattacaggcattgtcatagttactacttatgtgaactatggagctctttttacaagactctcctttgagtgttttttgtgagtgctggtcactcccttgtcctctctttccttaagacttacatcattcatgtgttatgtggtagcacaatgagggctgcagggagagccctagttgcttcacagagtgaacaaagcaagatggtctcagaggaggcctggccccagtgagtggcagctggggaagggcatgacatcatggttgtattagaatcatatccggaacctgtgatgtgtccagcagtattttggtgcaagtgccactggccataactcgtttctacttctacttccctatacaatactgtgctgaattgttgtttcatctgtcacttccagtgtttggctacctccaccctcgtggtctcagtgtgtcacttgttcgtctccacagctcacttcttttcagtgttgttcagtcttgactcactgtgttgtgaggtatgcacacagcctcaaatagtcctccttgatcaccagctatcaagtttcaattggattttcctaggactggacaacagcagtcttctgtacagcacatacatcactagcagacaaagtcctgctgagggctttggcagagagtgagttggagaccctccttctcctcctgtgctatacctcatccttgtatcctttgcgtgatgagatgacatctctaaaatcttaaaaaacccagtacttcaaaccagcctattcctccccagttccgttgttctcagaacagttccatgcactcagttcttgtgtctcacacatttttgtgatacatctttctccttccatgaaagtcagcatgcatttcatcagcatttctctgctttcaggttattgccatggaatggagaatgaggcgatagcttctgagcagagtgtatctatacaggtcaggacttctaagggcaatacacccacccagaaaactcacctcagtgagattaagatgtgtgtcccagtcttgaaagacattttgcctgcggctgagcaccaaaccacatcccctgtgcaaaagtcatacttgggtagcacaagcatgagaggcttctgcttcagtgctgaccttcaccagcatcaaaagcattacaatgaagaagagccctggaaaaggaaggtggatgaggctacatttgtgaccggctgcagattccatgtgttgaattatttcacctgtggggaggccttcccagcccccacggacctactccaacacgaagccactcccagtggtgaggagccacacagtagcagcagcaagcatatacaggcatttttcaatgcaaaaagttattacaagtggggtgaatacagaaaagcttcaagccacaaacacacacttgttcagcatcagagtgtctgttctgaaggagggctttatgagtgtagcaaatgtgagaaagccttcacttgcaagaacacacttgttcagcaccagcaaattcacactggacaaaagatgtttgagtgtagtgaatgtgaggaatcctttagcaaaaagtgccacctaatcttacacaagataattcacactggagaaaggccttatgaatgcagtgatcgtgagaaagcctttatccataaatctgaattcattcaccaccagagacgtcacactggaggagtgcgtcatgagtgtggtgaatgtaggaaaacctttagctacaaatctaacctcattgaacaccagagagttcacactggagaaaggccttatgaatgtggcgagtgcgggaaatcctttagacaaagctctagcctttttcgacaccagagagttcactctggagaaaggccttatcagtgctgtgagtgtgggaaatcctttagacaaatcttcaatctcattcgacatagaagagttcacactggagaaatgccttatcagtgcagtgattgtgggaaatcttttagctgcaaatcggaactcattcaacaccagagaattcacagtggagaaagaccttatgaatgcagagaatgtgggaaatcctttagacaattctctaacctcattcgacaccgcagcattcacactggtgataggccttatgagtgcagtgaatgtgagaaatcctttagccgcaaatttatcctgattcaacaccaaagagttcacactggagaaagaccttatgaatgcagtgaatgtggaaaatcctttacccgcaaatctgacctcattcaacaccggagaattcatactggcacaagaccttatgagtgcagtgaatgtggcaaatcttttagacagcgctctggcctcattcagcaccggagacttcatactggagaaaggccttatgaatgtagtgaatgtggaaagtcttttagccaaagtgctagcctcattcaacaccagagagttcacactggagaaaggccttatgaatgtagtgaatgtgggaaatcctttagccagagctctagcctcattcaacaccagagaggtcacactggagaaagaccttatgagtgcagtcaatgtgggaaaccctttacccacaaatcagaccttattcagcaccaaagagttcacactggagaaaggccttatgaatgcagtgaatgtgggaaatcctttagccgcaaatctaacctcattcgacatcggagagttcacactgaagaaaggccttaaatgtgaagggaatgtgctatttctttattcagtataatagcactggaggagactgtggtagccatcttcgtaaatttaaactttgagcacccacagtggggtattcttcataagtttcaggtatgtgggaagctctgaggaggttcattgtaatttctaatctgccgaggcctatagcctgatttatgtcactgccaatttctgaggctgaagccatttcacatttcacccctaccacctggcaggtgcacaccatgtgcatgagtcacttccccacagtgctcagagaagcaaacctctgtactctcccatttgcttggggaaattattaatagcccaagcatgtagggtcttcatgtcttttctctgactttagagtatacacctgacccagttgtggtccagagaatctgagttgtgctgtcagctttctaaggattacttttttaaggaacattgtcggtctcacatgatgcttgtaatgaatttttccacattctgattcaccagcctggaaactgcttggtgcacattgctttaatttataatgtttttataaaggttttaaaaaaatttacgcacctttaatcttgggtgttctattcattgcatagaatgacttgtaagcagaatagtgatgtcagcatgaaggggtgaatagattttgtggagatctcaaactttctgtactcagaagggacaatgtgatggcagaagacagctctttgttctgtattgctctaattggcctgctgcccaaggcctcaaagtaaagactgccaggctttgtgttcctgtattgtggcctggtgccatttttgtcaggtcagaggtcaccatgaaaaggaggcagttgtgacaatccccagtgcttctgtgaacgtgaattttgttcagttgtccacaggagatccacataattcctagcactggtgaggggaatctgttgcccaggtcctgcaaaggagccaggtgccatggcatataagtcagtgtagactggtgccatttgttgtcagactataggtgtggaggtgaaattacaggttcaacagtaattgggacagaaactccaggtaaatggggagtggagaagactgcagtaaattagatggaatgactcttctaaaagttcatctacaaattttccagtgaatatggttgtgtaggatcagtgcatacagaaattctcaggatcttctgtttactatcgctgagatcattatcagaaaatagtctggccgggcatggtgtaatcctaacactttgggaggccaaggcgggcggattgcctgagctcaggagttcaagaccagcctgggcaacatggtgaaatcccatgtctactaaaatacaaaaaattagccaggcgtggcagcatgcgcctatagtcccagccacttgggaggctgaggcaggagaatcgcttgaacccagaaggcggaagttgcagtgagctgagattgcaccactgcactccagcccaggcaacagagtgagactccgtctccaaaaaaaaaaaagaaaatagtctataaaggttttgtggctccttgtatcctgtctgggctgttcacctcaaggccattgctatgcaggtaggagaacaagaatagagagaaggatcattccgcggtccagggatgtggcttttgtgactcagccaacattcctattaattcaggtggcaacagccttcattgcttgccaaaatttgctgcccctgaggcaaggttgcctctctcagggcatgaggagagagagagatggtgaagtccatatcaggttgccaccctgattaaaaaaaaaggaacatctaggctcttaattttgagccactttttaaagctttttgaaggtctaatttgtataactgacatgcaacaaagtacacgtatccaaagtgtacagtttggtaaagccatgaaaccatcattacaaccataaaaatgaatttgtgtgtcacccatatatttaccttgtatctttttataatctttctcccttccccagctcttcaggttcaactgatttcctttacagtaaattagtttgcattttctggagtttttactgagatacatacacacacacacacacacacacacacacacgtatacgcatatacgtatacgtatatatatacatatgtgtttatatatgtgtgtgtgtatatatatatacttactggttttcttcatgctgtataattattttgagattcaaaaatgatgaatctttgtattgctgagtatcatgctgttctatggataagtcagtgtttatccatgtgtttagggacatttatattatttatagatttttgtatattacaaataaagctgctgtaaatacttgaattcatttctttatatggatatgtgttttattttcctcgtgttaataactcaaactgtaatgtcttagttacaatgtaggtgaatgtttaacattttaagaaatgccaaatttgatctaaatggatgtttcctattgtagtcccaccaagggtgtatgagagtcccagttcctttacatccctgccagtgcttcatgtggctaatcttttttattttagctctttgaatgtatgaatagtggtatctcactgtggttttcattgcatttccctaaaacttcctgatattgagcattttttaatgtttttatttgccacctgtgtaacttctttggtaaaattaaattttcttttaaaaattcctcaccacccattccagaatttgcatgtatgtgtgtgtgtgtgcacgcgcacacagacagggtctcccaggctagtcttttaactcctggccttaagcatttttcctactttccagccccagctgtggtcaatttgttttttcttttttttttggggggggacaagagtctcactctgtcacccaggctggagtgcagtgctgtaatctcagctcactgcaagctccgcctcccgggttcaagtgattctcctgcctcagcctcccaagtagctgggactacaggcgcccaccaccatgcccggctaatttttatatttttagtagaaacagtttcaccatattggccaggctggtctcaaactcctgactttgtgatcctcctgccttggcctcccaaagtgctgggattacaggtgtgagccaccgcacccagccaccgtggtcaatttcaaactgccatattgatgtcactgaacctggagttgggaagaatttctggtaacacacctttgtattctgtttccaatacactggtagagtatccaagatagccagaagaataaagacgacaataaaacagtaaaatgatcaggaagtggcaagttttaaatatttgttttttaaacaattttattgagatataatggacttaaattgtatgggtttttatctttcaccttagaagggattcagttgtatatttttaaaatatatattttgatgtttttatacatcgtacattcccaaaaccaaatgtttcttccagcccttttcaatttatcctttgcaacatataaattactgatagaaggacatattctgccttttgtaggggctatttacaaatgtccatcaatggaagacatcattataaaacctgatgaaccctttcccagtcttctatcatttatctttttttatttttatttttatttttttttgagacagggtctcgttctgttatccaggctggagtgtagtggtggatttatcattttgtcattctcttttttttttttcagcataaactatcaagcaattcatggttgttcttgtttcatctgtccccatgtggatttataatcagatatttcgttaaaggcataaagtcttcagattgcatttctaaaatttaaagaccgtttcgtaactataagattaacatacaaaataaaaattgtatgtgtacaaaattataaatgttttatatacagtactgaattgtatcaactgctgcttatttaagacagattgctatcagcatacaaaatatatttgatgtttagtaggtgtgtctttgagtttattaacctatacgtactgcttacttctttaatatttatgtaacgttgctaaactgcttgtccattagcttcccacattgtgctgggcgcagtggctcatgcctgtaatcccagcactttgggaggccgaggcggacggatcacgaggtcaggagatcgagaccacggtgaaaccccgtctctactaaaaatacaaaaaattagccgggcatggtggcgggcgcctgtagtcccagctactgggaaggctgaggcaggagaatggcgtgaacctgagaggcggagcttgcagtgagccgagatcgtgccattgcactgcagcctgggtgacagagcgagactccgtctcaaaaaaaaaaaacaaaacgaacttcccacattgttgatttggcttattaaatctcagattctgttcagtgtgttcaccgctcactccgccccccattccccagtatttcctgtatactagatattgatgaaatgagtgattaagatctgttccaagtggacaggtttatgttggtgacaaacctggaaacacagtgtgccttttgctaccacaacatgagcagcctggaaataaacattacaggtattgtgtgtgctggttgtgagacaggtgtgcagtagtgacagcacatcctagcaagatacacatacatctgtggcatacattgacagatgtaggaaactgacaccccccagcacagcctggagccatttgtgtatgccacatccgcaacagaaaagatgtatgacaaacctgaaacacacacacaggtatgtgcaaaacacgcaaggatcctgtgagacgggatggagatactgacacaccatagcagtctccacagagacttgtgggacggacatatgctagggatacccaaaaatctgatatgtggggccaggcgcggggctcacgcctgtagtcccagcacactgggaggccgaggcggacagatcacaaggtcaggagtttgagaccagcctggccaacatggtgaaaccccgtctctactaaaaatagaaaaattagccaagtgtggtggtgcgcacctgtaatcccagctactcaggaagctgaggcaggagaatcacttgaacctgggaggcggaggctacaatgatccgagatcacgccactgcaccccagcctgggcaacagagcaaggctccgtctcaaaaaaaaaaaaaatctgatgtgtgggccacaaacacaattgcactatctttgtggggcaattgtgatgaggcaggcacaacctgatgtgatactactactccctacacacatcactgcatactagatgatgtactgatgagggaactggttcataccccagcacaacctggaaatacacgtgtgagcaggtttgacctaagcaggagaataggatgtttatgggctttataggagggctcagccagattcagccagtttcagaagtaattggtcaagtacaggtgggagaaggaacactctaggggattagtactcattgtctgtcattgattttacacagggctggggaggagcagttgggactaaggacacctgctacaggggttgggaggcaaaagccatgggtacagagacgcgcgatggtcacgctggacattctcagttcttcatcttctctcccaatgtctgcagtagtgactgataactgagtgacagttcagtatggtgtggaggaagcatcctatggtggtgtttagatggaagaccgaaaggaccccaggaatgaatcattgcatggggttgtgagagagcgatgtgtttggagtgacaccagggaccctgttggaggtgttcaggcagtggcaatgctgaccatgggaagcaagtttgtggagaaggacttgaggccccaggtggcagtgtcccagtgtggttactcatgttctgggcttagcagacttggcagagaggaatctgtccagagtctcctgcatttccagtcagaggagtaaagggaccaaggcaagccaacccagttcagcgtagacctcagctgcttgtgtgagaaacacactcacccatccaaacccaaagaatggactaaaagacacgaagaacagcgaaagtgagactttcagtaacagtcttgcaagatcaggggactggtgtaggcaggcatatctagggtagtcacaacaggtaatttatctccttgcttgcaagtccctcctccaagatactcattggtccagtactatgaggttacagtcttcccagatgtcgtctaagtttcattatcccccttataacgttaaaccccggtccccttccctgcttaagttttgatttccaataatgaaacattcttccctttcatggcctgacccctcctctacattctgtgtacctattgtgaccttctagatgcatgagctgtgtggtttgttacatttgcaggctggctgccagtacttagatttatcatgccttgaaaatgggctatttaaaatattttcccacccttggcagctgtggtcgtgtatggatgttgcttgccctctctgaactgcagatacattaagagacaggaatgatcattcctctctactctttttggggggaagaaggaataagtaaggaggtaatccttaggaagtgggtcaatattagctccacatgaaaacagtagtcttggccaggcgcggtgactcacgcctgtaatcccagcactttgggaggccgaggtgggtagatcacctgaggttgggagttcaagaccagcctgaccaacatggtgaaaccccatctctactaaaactacaaaaattagctgggcgtggtggtgcacgcctgtaatctcagctactctggaggctgaggcaggagaattgcttaaacccgggaggcggaggttgcagtgagccgaaattgtgccattgcactccagcctgggtgacagagggagactccatctcaaaaaaaaaaaagaaaaagaaaaagaaagaaaagaaagtagtagtcttgattgtcagcatccagggaaatgtgcaaaccattctcgtctcagcctcctgagcagttggcactacaggcgaacaccacgatgcctggctaatttttgtatttttagttgagacagggtttcgccatgttggccaggctggtctgaaacttcaggcctcaagtgatctaccctccttggcctcccaaagtgctgagattacagatgtgagccactgtgcccagccggaattccttttttttttttttttttccttttggagacggagtttcttgttgcccaggctggagtgcagtggcactatctcagctcactgcaacctccacctcccaggttcaagcaattctcctgcctcagcctcctgagtagctgggatcacaggcatgtgccaccacacctgactaattttgtattttagtagagatggggtttctccatgttgttcaggctggtctcaaaactcctgacctcaggtgatccgcctgccttggcttcccaaagtgctgggattacaggcgttagccaccgagcccagcctctttttcccttcgttttattctaatcaaccactgaggttcaaagagggtctctagtcactaacccagccccgccccagcccactcagcccctgtccctggtgtgagccaccgcgccgcccagctggaattcttcagagtagaaaaaagggaaggctttaggtgtgctaattggagtctgtgggtctgaggaagccgaaggcaggctaactacaagtagggcctactctgtcattggttagggacacatacttgatttcatccatttgttcttaaattggaaagggagacaaacattagagaagctgttagtcaagtccttgacaggggttgttggggactttctcaaggtcacttccttgggaaggagtccttcagaaattcacactgagatctctggactctgcagccagtgcttcttccaaaaattccatccaagtagaagctgtggggtcagggggttctaagaagccccatttctctttctcttgtaccttaagacctgcctggatcaggtaaatgataaggcatcaactcactaggtgctggggatagtgctcggccctgcttaccacctgcctaccacaccttttgccaggatcccagagagtactgtgagcactcctattccacaaacataaaactgaggtaccaagaggctgcaaaaccagcagagtcctgatgctgggcagtggcagaggagggattaaacccaggcagcagagggagcagagggcctggggcagccaggcaccggaagtgctgcaagcaccaagacccagggtggtaacttgcagggggaggccagagcatgaaggcagagggaggttttgggtgcagcctccaagtagggaatggacagtttcagtgttgaggcagagtggcaaagacaagagacccacagcacccaggaaatccctcagctataaatacagtccctcagcacttttcactccccttcccaaggatactatcatcaccctctcctcaccttggaaagaaatcagggctccaactagagctgccttgctggaagctcgcactgtcctgtcccgatgtatcatccagcagccccaaggcagctcccctcattatcctctgtcataaagatatgatgtttgcttttcctctaggtaaagccagtaaggtaatagagcatcacctgttaggatgaactatgtgtgacaaatggtgctgtcaaattcgtatttgaggacttgttgttgtttatcttgaaaacgtgtgtaatgggctacatctgctaggccatatgaaggagtgaggcttttttcttaccttgcaatttcttagtggattgtctgtgatgtgcatcacattctggtttaatgcttaataaaagcgttttctgtctctaccttcgtggagaggatttctgggttgggagaaggttttgtatttatttcactgttgccatcacacacctgtctgctgggacaaaatctcaatcaccgatttcatcaacatctagtgtacaagttaaacaatgttagagattcaataagccacatctagaatacagcaaattctaattaaaaaatgactcagcaacttcaagaaataagaaaacaaaggtaaatggaacctgtaggttacagacttatgagatacaactactgaaagctattaaatatacatttggatcctgaataaaaatgatcttccttaagaaacacattgttttagacaactgagaaaacagaagcgataaaatatttacattttaaaatatatttgtgtgattttttggggggttataaaagagcctttacattttaaaattgcattctgaagaggctatgcattaaataatatgatatccgggagtataagtaaaataacgcactagtacacatgaggaccgatgaaacataaatgactatgaaatgataaatggtgaaggaaaaaaaaatagtgaaggaagactggagaaaggttcatctggcttcataacagtcttttccatctttttttgtaattgaacacagctgtaacaggagacaaaatatgtcattgtaccagtaattttacacaatgaaaattaattttatatgttgagaatgaactaaaaagacagaaggaaactgcgttccagggtgtaagcatgtatgaaaatatcaaaatatgcattttaaatataagcactttaagttccattatacctcaaactactttaaaaaactactcaaaatatccataacaaatgaatgaatgaataaacgaatactggtatatccacagaacatcatacttctcagcaatacaaaaaaaagaaactactcatagaggtataatgatgaatctcaaaataaatacgtgactatacccagggattaaaaaagagtaaatacattatggtttcaatcatataaaattctagcaaatgaaaactaatgtattataatggaaagtaaatcaatagttgcctataggcagataattattaaaggacaatgaggtaacttgtggaatgacacgttcattgtcatgattgtgaagaaacaacttcttcctaatcatttcactacattttattttctacattcttgaggttattcgtggccactgtatcagtatggtagaaacagaatatattaggatgctatcagcaactcttcccaattctacattcagtaacatgttggcagtttcaaaattggcatggtgggagcaattacaggttaatatgaatatcaaagctgatcaaattatatagtttaaatatgtaccatttattcttattaaaattattatcaggttagtgcaaaagtaattgccgtttttgcatgttggattttgccattttatattggaaaacattcttaaataaatgtggttatacatcattttaataggcatttctcgctttatgtttttttgctgacttactacttgctgtttatgtttattttagactatggaaatgttagacaaaactcaaatttcagcgatttttttgagatagagtcttgctctgttgcccaggctggagtgcagtgacatgatcttggctcactgcaacctccacctcccggggttcaaacaattctcgtgcctcaggctccccagtagctgggattacaggtgcatgccactatgcccagctaatttttgtatttttagtagagacggggtttcaccatgttggccaggctggtctcgaactcgtgacctgtgatccacccacctcggcctcccaaagtgctgggattacaggtgtaagccaccgcatctggcctcttttttttgagacggagtcttgttttgtctgtcgtccaggctggagtgcagtggcgtgatcttggctcactgtgacttctgcctcccgggttcaagtgattctcctgcctcagcctcccaagtagctgggactacaggcacatgccaccacgcccggctaatttttgtatttttagtagagatgaggtttcaatatgttggtcaggctggtctctaactcctgaccttgtgatccacctacttcagcctcccaaagtgctgggattacaggcgtgagccaccgcacccggctgagattttcttacttgagttcccaatgggtcgtaaagcagcagagacaactcacgatataaacacatttggcccaggaactgctaacgaatgtacagtgcagtggtggttcaagaagttttgcaaaggagacaagagccttgaagagaagtagtggccagccactggaagttgacaatgaccaattgagagcaatattagaagctgatcctcttacaactacatgagaagttgcctaagaactcaatgtcaaccattccacggctgttcagcatttgaaggaaattggaatggtgaaaaagcttggctgggcgcagtggctcatgcctgtaaatcccagcactttgggaggccaaggtgggtggatcacatgaagtcaggagttcaagaccagcctggccaacatggtgaaaccccatgtctactaaaaatgcaaaactcagatgggcgtggtggcgggtgcctgtaatcccagctacctgggaggctgaggcagaagaatcgcttgaacctgggaggcggaggttgcaatgagctgagatagtgccattgccctccagactgggcaacagagcaagactctgactcaaaaaaaaataaaaataaaaataaatcatggttcaaaaccacagttacttttgcaccaacctaacaaaatatggttcaaaataaaagtctgaatttcctattgtttttggaaaatcaggtttgacaaccctatgttgattccaccatctctctcctcatgtcctgggagaggattttgcctcagtgatcacaaatacaagtgaacagtgaaggccatttccacctgactcaacagaaatgttggctggatcacaaaggctgtatcaatggcctagacctcccttctctatccttgttttcctgcctgcatagcaatgaccttgaggtgaaaatcccagaggctacaggattccataaaatttctgacaatgacctcagctacacaagatacacaattctgtaggtcctgaggatttctgtacctgctcatccttaagagccataataacgaacatcatggaaacctctgtaaaaggggcacattctatttattgcagtgttattgcagttttccactctctatcaatccagtacttctataacaattataattcctactataatcttaccacctgtggtgctaccctgtggaattcaggatatcaaggcatacaggacctggggaacagatttcccccactggcactgaacacgatgcagtattccttgtgaacaagagaacaatttcatgttgctttcagaaacatcaaaggatgtcaagtaactgctgcctcctcaggctgacctctatggcatccaggatataaattaggacaataccctgtagttttttctcagaggccttgaatagcaatgaaaactaggctcaaactagagagagagctatattctgccatcctactgtccctgtccctgtccctgttgagctacacaatgtttgggatctccaaaaaaagttattcaccccttcatgttagcagaacccaactgttttcaaaccaacccatacatatagaacccccaagattaataaggcctttgttattgtacaaaccaaggcaataagaggcagttggttcccacagttggtgatttgaaggctggcaaactctatcaagagtcatgtgagaccaacaatatcctgaaatatgtagtccctcttttcaggtcaccagcagagtcctctgggccaaactgggtcaggtccatggcctaactcatcagaaaggaaaaaaaaaaaacggaataaatgcttaggctatttacaaattcctcccatgaacagaacaccaaggttcacttacctgaatacactgggatgggtgagtggtgcacactggtggtcacctgccaggcagtagaggtaaaatggcttccactatagtatcagcagagacataaatctgacatgggccctgggcagggcaaaaggtgcaatgcagttcacacatacctggaatttatgcagatgttcagatataggatgttcaattcaggctgatgccaccctcataagggatctccttcagagctgttatatcaactggacatccctacatatcaaaagtgtctttcccttgtgaactgtgtggcactcaatgagatatggccttcagctgaagctttctgacattcactgtgtactcaaggactttctccagggtgctaacagattttccacatttgccactcataaggcttttatcgactatgaattctctgatgtttaataaggctggagttatggctaaaggatttcccacattccgtgcactcataaggcttctccccagtgtgaaccctcctgtgcttaatgaggccggaattttgagtaaaggatttcccacattcactgcactcatagggtcttgatccagtgtgaactctctggtgttttcggagactggagctgtagggaaagaacttcccacattcactgcactcataaggcctctccccagtgtgaactccccgatgttgaaggagtgcagacctttggctaaaggatttcccacattcgctgcacttataaggcctttctccagtgtgaaccctatggtgttcaatgaggctagagttttggctaaatgacttcccacattcgctgcactcataaggcctggatccactgtgaactttctggtgttttatgagactggaatgatatgtaaaaaacttcccacattcactgcactcataaggcctctccccagtgtgaactccccgatgttgaaggagtgcagacctttggctaaaggatttcccacattcactgcactcatatggcctttccccagtgtgaactctccgatgtttaatgaggttagacttgttgctaaataattttccacattcatcacattcatgaggtcgtactgcagtgtgaactctccggtgctgaatgagactagagctttgcctaaaggacttcccacactctcgacattcataaggcttttctccagtgtgaagtctccaatggtcattgagactgtagcttttgctaaaggatttcccacattcactgcatatgtaacatctttctgtagtgagggttctctgctgctgaacaagtgtgtgtttaccgctgaatgcttttgtgtgttctccacagttgtaatgagtttttcctctgtgactgatggccccaccgtcgcttttgctatttgattgctccccagtgtgagcagcctgttgatggagaaatcccaacttggccaggaagtccttcccaacttctctgcaggtggaaggctcccctgacacatggaatgtgcaggtcttcacaaacaaggctctgcccacattgcttctgaaatgtttttctccaaggtgctgcttctgatgatgaacatctgcaatgaaatacaattatttcccacatgccccacctctatataatttctgcctatgatgtgtcccctagggcccagccaagagcaaaatgtctctcaagaccaggctacacgtctcacagtggtgggccttctagggagaaagatctgccttagaagtcctgagttgggtcactccttctaaagaaatgctcttgtcagaaggtgcctcctcatccaccactctatgccaaaaacctaaaagcaagaaatgctagtgaagtgcacattaactatggtgggagggggcagcccttatacaagtgtgtgtatgacaaacccaggaacaagtccatgggatcgtttgcatgacagtagagttgggttcagttgcagatgaggctgtttagcaattctaggataaagattacaagaatgggccgggtgcggtggctcacatctgtaatcccagcactttgggagtccaaggtgggtggatcacaaagtcaggagtttgagaccagcctggccaatatggtgaaaccccgtctctactaaaaatacaaaaattagctggacatggtggtgggtgcctgtagtcccaggactcaggaggctgaggcaggagaatcacttgaacccgggaggcggaggttgcagcgagccaagattgcaccactgtactccagcctgggtgacagaaggagactccgtctcaaaaaaaaaaaaaaaaaaaaaaaagattacaggaatgtgggagatctcaagaggtaaaggccacaaccatgaggtatcacaaagagagaggcagggtctaaaactaaatcctctgcaaacaactttagcagaagcttatctgctggcgacacatgagtgctatgtagaatagtatatgcaagcccatggaaatacgactgcaatgcagcagctggccttcaaggactgtttaagagtatgtgcaaggacaggcgcagtggctcacacctgtaatcccagcactttgggaggccaaggtgggtggatcacaaggtcaggagttcaagaccagcctggtcaagatggtgaaaccccatctctaaaaaaatacaaaaatgagccaggtgcagtggcatgcgcctgtaatcacagctactcaggaggctgaggcaggagaattacttgaacctgggaggcagaggttgcagtaagccgagatcatgccactgcactccagcctgggtgacagagtgagactccgtctcaaaaaaaaagagtatgtgcatacctcatgacacactatatagaggctaacgttagaaagaactgcaggtgtagcagtgagaaaaacagataagatacggagtccagagatgtgaggattagccccaggctggatgttaagagcagaagtgacaagtagtagagctgacttgtcagcaaaatgtcaagaatggtgaagggaaaccggaagtgagctgtgaccactggcattggcaccaaaatgctcgccaaacagaacaggttgctgctctgatacagcatctggataatgtaagtactaagggaagaaagaacagaagagcagcctgcactgtcccacaaaaaactcagcacatgacagcccacaggaaaaacacacacacacacaaatactacaaagaaaatttcagaggaatactttgtaagaagagtccatggtctacataagtagtgaccatgtcagtgacaataactcctggcataggcaggcataatgaaatgccagctcgggatggaagtagtagctggggcacacaggatcctcaaatctggaaaaagtcacccagacatggaggggacaatcaaggtgggatccactagggtgactgcaagactgcagactctgaatccttccctgtgaggctgtgaggaaacaggtactggggctcctcaaggagaggagaagacagtatgcacaccttagtcttaccaatgacagaactatgcagggaactgagaaagaagcagagcccatagtcttgtcatgagaaggacagacctgcctatagagaaaagaggaagggcacagactagctcagggcacaggaaagggtaaaagaaccttacctagagaggttaaaagagccaagttctccagcatcacatcacggtacaggcatctttgagcctcatcaaggagaccccattcctcccaggagaagtgtacggccacatcttcaaaggtcacagtgccctgccacaatgggaacagatgaaaccaccaagagcccctatcccaaggacccacaatgcatacccccacatctttaccccatgcccattctcttcccaagctccccaactgagaggagaaaccagcacatggataaataggcatctaagctgggggcctggcatggaaggatccatactatcccatcatgaaatccccctgaaatgtccaaggtcatctaagtctcaataccagggccctgcagctgtcacttactccctttccagatgcacatcattcttcagaatacacatccctcctatctccagacaccacagccccaagcccagggctgccacctcactgcccacaccataggcatctccctgctcttacctcccatgtcactgttttaatctcttcctctttaccccattagcgaaggcaggattgccacactagggttatggatatggacaaacacacaatacctgacactagaaagacgatacagcagttgggtatggtggctcatgcctgtaatcccagcactttgggaggccaagacgggtggatcacgaggtcaggagttcaagaccagcctgaccaatatggcgaaaccccatctctactaaaaatacaaaaattagccgggcgtggtgaagcacacctgtaatcccagctactcaggaggctgaggcaggagaattgcttgaacccaggaggcggaggttgcagtgagccaagattgcgaaactgcactccagtctgggcgacagagcgagactccgtctcaaaaaaaaaaaaaaaagaaagatgatatagcagtttattaatcatatgtacatagaacctgggagatgaggacaacatgtaccacacagggtcacatgggggtctagtccagaaaaaaagtgaataaccaaaaactgtgggatgcaagcactttgagaacaaaaggatcaactgccccctggttcccacaatgggcttgtttggaaaactccatgacctggtagggagctgaaatctgctacaaagtgataggcagaaattgtgcctggtctccttgattaaaagggttgtctgtttgggagaagagtagggagggaaacttgtactcaggccatttgatgccaccctgatttcaccagatgtcatactgggccttaattttagactttacaccataacttagcacacagcgtccagagtatgctcgacagattcaaacggatctaatactaccctagatctcccagggcatccactagtggtagcagccccaaatcctatgagggctccctggctggctccattctttgcctcagatttaggccacacagaaccacatgtgcatctcagatacccatggccctattccacttccgtgctgcacttgctagcccctcagcagtaacaaccttcctctgtccacttaacactcaaagactagctccactgatcacctaccccaggccaagtgactgtcacagatgaccacattggcacctggccttatcctccaggttgaataaacaccctaggccccatcaaagtcatcaaaaaatcctggtgattccacagagtgctgaataagcacaaaggaaaaaaaggacagccatttgcctcaaatacacctatgcctctgcatccaccttatatccactcttcccttgaaagtgtatgccacctgcccaactatcctctccaaacaccctacctccatagccactaacctcccttacctctgtttagaaagcccaagaatatcacccacttatccaaccaaaaggcttggtccttagcccccattctgcccttcctggccaaataacctgtaccaccatgcctaaagattaacccttgtaggccggatgcggtggcttacgcctgtaatcccagaactctgggtggctgaggcgggtggatcacctgaggttgggagttcaagactagcctgaccaacatggagaaaccctgtctctactaaataaatacaaaattagccgggcgtggtggcgcatgcctgtaatcccagctactcgggaggctgaggcaggagaattgcttgaagccgggaggcggaggttgtggtgagccaagctcgcgccattgcactctggcctgggcaacaagagagacactccatctcaaaaaaaaaaaaaaaaaatagaacaacccttctaaatgtaatccacagctcactcaccttagtccacacaatgaccaccacattttggatgtctccattctgaagcactccccagatttccagacctgggtgttcagccacctacttaatgcctacttaatgtctctgaaacatctcaaactcttacatgaccaaataaagctcctgttgtctccagtgaatattactgttaataccaacttctccatctcagttgaagaaccatggggtcatcgctgaatcctgtttcactccctcgctgtctacatcagaaaatttagttgctccctttaaaaatttgcatccagaatgcaacacatctcctaatcaatgactctggtccattaccctggactggctgtagcttccactctgatcttctttcctcttccctcaaccccacagtctgctctccacgctaacgggatggaccctgttaggactttggtaagatcacctccctcttgtaacccaaatctctcattacctccagaataggtacccaacttctcaggcagccactgcagtcctgactccttccccctgctctttgttcccagctaaaaggaaacagatctatggtttcctcaaaaatctcagcttagttttactaagcacttgcgcctcctgataccagtgccagagataacctttcacaagtttccactggctgacaaaaatgggaacacctcagtataacccctgtaacctctggcatggacttaagagccctgggcttggaatttctccagggcaccagacccaggattggggtaacagcacttaagaatactaggaaaccacaatcccaagaacatgggggtagaggctactgagggaccgaacactctccacttccctatgtgagttccatacgcccttctacaactgggagaaccagggaaagaggaatgcatccctggtgaggctagatgagctcaagcctccctgtagccctgcctggccctgaactcaggctggctgttttactttctggtctcagtgctgtcacctcttgccaactgtagggcaatgaaaaaaagatgtagcctcccactatctcaatgtcctcatcgccccatcgctgctcttcctgtgaacagtctttggaaaagtttttaaaccctaacatagggcgggcacggtggctcacgcctgtaatcccagcactttgggaggccgaggcaggaggatcacttgtcaggagttccagaccagtctggccaaaatggtgaaatcccgtctctactaaaaatacaaaaaattagccggacgttgtaatcccagctgcaggcttgtaatcccagctgctggggaggctgaggcaggagaatcgcttgaacccgggagtcggaggttgcagtgacccgagatcgcgtcattgcactccagcctgggcgataagagcgaaactccgtctcaaagaaaaaaaaactaacataaatggcgtccctcctttgttcagaactctccgtggcttctagcatcctcacaatgacagtacaaccctaggagtaactccgcctcatattcttcgttccctgcagaaaacagctttccgaattctcctggctcagtcgcgcctcaacctttgcacgcgccggttcctccgcctgtcacgctctcccacacctcgtcacacgcagtgtcaaaaaaagggccccacccacgaacgcctcagtgtccccgaccctgggcagcggggactcgagcaggcgcccctcactgatggctttagaacgtgggtgggggaaggtgtgtgaggacgggaagacgccgcactcacctgagttggcgtcctcagagtggccgctgccatcagactctgcgggtagagctgggccgggagcgacgggcgacattggtagggacccggggacagcggtccctatcccaggcctgacgtgggtcccccagggcggcgtcgccaaggcttagacgctttcgtgcaggagggacgacgactcccctcacgccttcgtggccccaactcggcgctctgctatctctgatccggtgaacacacctcagagaagctaaaatggccgccacgaagaggcccccccaaaagtcccgtcctttctttttgtgactctcaaggaaagtcggttttctgagctcttactggcttagtagcgtggcgttcaacgcagagcattctaggtaatgtagttttcatagatcccgaggtgggtgccggggaccctttgcaccaacctcttggagtaaaagcgaagctccagggcgctgggcgatgagaaatggcttatccaagtcctagggcagtggagggacttcgccctttcttaaatgggtcgtaatcagacagcatattagaggtgccatctgcaactgatcacccaagtgtttggggaatattatttcaaacttcataaagttcagcaggctcccagaggctaaaattattatcagacgctccctaaggctgccaatccaaatatgtacatcattccatagagccattcagacacgaaatatatccactagtagggaagctaataaacattaccatataagtttattcctttttttttttttttaagacaaagtttccctctgtcccccaggctggagtgcagcggcgccatctgggatcactgcaacctccgcctcccgggttaatcgattctcgtgcctcaaccttccaagtagctgggactataggcgcgcgccaccacgccaggctaattttttgtattttcagtagagacagggtttcactatggtggtcccaaattcctggccccaggtgatctgcccgcctcggcctctcaaagtgctgggattacaggcgtaagccaccgtacccagcctctatcatattacatttcaaatgtatgcactccgaagcattgaagtcagtctgtgcacttttggtcagggacaggtgaaaaactacttcagatagtggcatgatagtgcttctagaagatagaagagaaatgttagatcaccttgaaacagtagtacaaaggtagaattctgtctgattccaacagaaaacatcttttgcctgcatagtcaattattgtgtccaattactgtgtccagtcaataactgtgtccaattcactgagcaacgcttttatccatttcataattcttacttgatatctgagatatattccttctagaagtctaacatcaatctcaaaaaacaatgaaagaaatgctactttgataagagacaaaggggagaggtgggacttcttaatcagaaagccggtgaaatgcacttgaaggaagtgagaaatgagccatgtgggtatttttagaataaattccaggcagaagaagcaggttactagagtgcctggatggatggagacttcacagggcatttcagcattggagggcctagggctccaacccagcaggccttcatctgctttgctggctgcagagacactcagggtatataggtgagaaatctcttcttttttttttttctttttttttgagatggagtttcactcttattgcccaggctggagtgcaatgacgcagtcttgtttcactgcaacctctccacctcctgggttcaagcgattatcttgcctcagcctcccaagtagctgggactacaggcgcacgccatgacacccagctaatttttgtatttttagaagagacggggtttcaccatgttggccaggctggtctcgaaccactgacctcaggtgatccacgcatctcggcttcccaaagtgctgggattacaggcatgagccaccgagcctggccgagaaatctctgctgctttgttataaagttttggagccgcaaaataaatagcactcgaatataaaattttctttttaattctcagcaaggtaatgtacttttttttttttttttttttttgagatggaatcttgctctgtcacccaggttggagtgcagtggcgcgatctcggctcactgcaagctccgcctcccaggttcacgccattctcctgcctcagcctcccgagtagctgggactacagttgcccaccaccatgcctagctaattttttgtatttttagtagagacagggtttcaccatcttggccaggctagtcttgaactcctgacctcatgatccacccacctcggcctctcgaggtgctggaattacaggcgtgagccactgcgtccggccccaacatttattttaatgttcagattctcccagatgtttggacagtgggaactcattaaagctgtgctctctgcttttttatgtcaatattattgataatttcattactttctaatccaaaaatattttcaggctcatgttgtacccttgctatcccagccccagaatcagcctctttttcaaggagctctggttttcttcaatagataacaatgcttgtaaatattagtaagcattagctgtgctcttttctactggtaaatcattgattattaggtcctcttggagagaaagcagatacatacacatgcacgcacacatttttttttttttttttgagacagagtcttgctctgtcgcccaggctggagtgcagtggcacgatctcggctcactgcaagctcagcctccgaggttcacgccattctcctgcctcaggctcctgagtagctgggactacgggcgcctgccaccacgcccggctaattttttgtatatttttagtagagacagagtttcaccgtgttagccaggatggtctcgatctcctgacctcgtgatccgcccgcctcggcttcccaaagtgctgggattacaggcgtgagccaccgtgcccggccacttgcacacatttctatacaaatttatttctacatctatatttacatctgcaaagacttgaaaaattcagatatttgaaatgactcatgggactgaaagcactctctcataaggcttttatttaaatataaagcatacagtacagctagagaaagacagaacaggcatcagggctcagaaagatctggacccatgaccctcaggattcttattcacaagtggacatgcttcatctctggactgtgccactaatatatatgggatggagcttgatttcagaagaattaataacagaaatttccaatagggacttttatgtccctctggctgcatgacccaagccaacctagccatttatgccaggtaaaagccagctgtaaagacacgaaaaaatttcagagtttaagcagcacattgtaactcccactgcctttctttgctaaaagtcaaactaggtatccagatgtccccagagataagcataaaattgtcctattccagctataaagtgttatctgttctccacagtcatccctttgttggctgggtatttttaattacaaatcactccttcttaatattaccctacatcattttcactatttatagaacagaacaagcaaaaagggcagctgtcaaaatactttgtgtgcattatttgagaagtgggtattgcttcaaaatatttcagaaaatgaaatagcccagcacaaaggttcataatcatgcacaagattggctactattttacctccttccatcatcaactttaataacagtatcaatagacccattcaattcaaagttaattctagttcctctcctagccaatattttccacggatagaacatcttgtggttgttttaattcaatttctcacttcattttataatctgtatcagtcttatcataagctttgtttgaaatgtgttagtcaatttgtgatgccataaaggaatatctgagattgggtaatttatttaaaaaaaaaaaagagggagatgtatttggctcacagttctgcagacagtacatgaaggaaagtgccagtatctgcttttggtgagggcctcaggaagcttacaattttggcaaaaagtgaaggagagccagcgtgtcacatggtgagggagggagcaagagaggtaggcaggaggggccaggcttttctaaacaaccagatcttgcatgaactcagtgagaactcactcactaccatgaggacagcaccaacccattcatgagggatccacccccatgacccaaagacctctgactaggcccacctccaacgttgaaggtcacatttcaacatgagatttgcaaggaacttacatccaaaccatatcagaacacatcaaattaattttaccagatataccagtattacaccaaatagcagataacattatgagtctgatcatgatcattacaaaataagtcaaaattacagtatattctccacctttccttcaaattggggttcttgcccgtataccaaatatatatgttttttagacataggttctcactgtcacctaggctggagtgtagtggcaccatcatggttcactgcagcctcgagctcctgggatcaactgatcctcccacctcagcctcccaagtagcagctcatataccacatattgtcctacaaaagggtttaaatccagggccaagtatcatccagagaatttatttttatttatttatttgactctcgttttgtcacccaggctggagtacagtggcacgatctcaactcactgcaacctctgcctcctgcgttcaagtgattctcttgcctccaccttgagtagctgggattacaggcacccaccaccatgtctggctaatatttgtatttttttttagtagagacggggtttcaccatgatgtccaggctggtctcgaactcctgacttcaagtgatccaccagcctcagcctcccaaagtgctgggattacaggtataagccaccatgttcagcccatccagagaatttaaatgttcttctgagggcagagtaaatgcatattggggactatccctaatgaatgaaaattggctttggcttcctaatggaaaagaaggcatgagccaaatctagtacagaatactgatctctctgagcttgcagcacagctttagttgttgatgccatatcagatatagctgatcaaatggggtgacatcaatttatcaagtcttccgtaatctatagttaatttaccagatccatcagcttttcttccaggccatcctagaccgaggctggagtgcagtggtgcaaacatggctcactgcatcctcaaactcctggccttgagtgatcctcccctcagcctcctgaatagttaagactacaagcatgttccaccacactcagctaatacgttttcaaattttttgtagagaggaggtctcactatgttgcccaagctggtctcaaactgctgggctcaagtaatcctcctgccctggcctcccaaagtgttgggattagaggtgtgagccaccgcacccagcccatcctagactactaaatagggaattttagtaatatacctgcatctaaaagatccttaattcaagtcaacatttatttcccccaggaattctatggtgttataatcacttgagtgagcttagctgattctaaagattccatctagcatgctcaattaacacaggactaaaagcagatttacatggcatcctatcaattccaataatgccttgtggtaatggtgaagcaaaaatcatacataatttctgtccataaatgcctctatagaccatatttctccagctgcaagccttctctagctgtatcactatgttcgtgtaattgtatttccttttaagtttacattagctaactaagttatagcgacatcgatcatcaattgtagtaaagttttctcactgcctgcagaccatttacttcattccaatgaaagtgaacttgaagtcccagctagaggtcatgagaccctaacaaggtcatgagatccattgtcaaaggaaattaaattttgggaccccaaacccatttagccaaggggaaaagtcaagctgggaactgggtcatgcaaacttgcctctaccttttggttcctaaataaaatggctgcaagatgaaaagctacccactttccccatattttacccacaaggaaattactggtgagctgttaaaacttcaccatggtggccaggcgtggtggctcacgcctgtaagcccaacactttgggaggccaaggcggctggatcacgaggtcaggagttcaagaccagcctggccaagatggtgaaaccccatctctactaaaaaaaaaaaaaaaaaaaaaaaaatacaaaaattagccaggtgtggtggcaggtgcctataatcccagctactcgggaggctgagacaggagaatcacttgaacccaagggacagaggttacagtgagccgagatcatgccaccgcactccagcctgggcgacagaagtgaaactccatctaaaaacaaaaaaaaaaaaaaaaagaaacaaacaaaaaacttcaccatggaaatgcaaactgatagtttatctttacaggtgcggtcaccccagcctgtcagacacaaaatgcctaccccatttcctctgtgttatcttatgtaaaatgcagattccccacatctttcttttgcccccttttttaatgtgaaaactgtgtgcttctcaatatcccaccctttcctctttaaatttggagccctaaaaatcatcttcagagaaaagcatagacttgtctcccgggtgggtcgttaactttggcaaataagtctccaaaatgattgagacttgtcttgtcattttcttcaattgacatcatcattcagtcataatactccccatttctctccctggttataatcagagcaggctctgaagagattatacttgtcacctttttataattttgacattttgaaaaattatcaagactagggtgaattaattagttccagatctttcagtagaccagttatttttacagggattcaatatttttagtaactactccatcttcctttcttgtttaaggtcatttttgatcaaccatctaaacatttttatccaattctgttttcctgaggtttcttccatctctttttatttatttatgtatgtatttatttatttattttgagatggaatttcactcttgttgcccaggctggaatgcaatggtgcaatctcggctcatcgcaacctctgcctcctaggttcaagcaattctcctgcctcagcctcctgagtagctaggattacaggcacgcgccacaatgctcggctaatttttttgtatttttagtagagatggggttttaccatgttggtcaggctggtctccaactcctgacctcaggtgatctgcccacctcaccctcccaaagtgctgggattacaggcatgagccaccgcgccaggctatctcatctcttttatttttagttacttttcttctgaatgattcttacttttccctccccctccagtattaagtcttattcaagacagctcaataaggaggtccataacatcaagcctcatatcatgttgcctccccttttaccatgacatcaattagctgggtctgcaggatggagttaggaaaaggtatggtagtgtacttaactacaggctagaatctacagctggtatagtttagatgtgtgtcccttccaaatctcatgttgaaatgtgacctccagtgttggaggtgggcctaatgggaggtgtttgggtgttttgcaggacatttagttatcccctccgacccacagactccaggtcctacttatattcttcctcctgtttgtgagtgaatcacataacttgtgcaatctcaatccaaggactggaagccaacctattcacaaaaaatcttcctcaccagcctctaccatatttcattctgcccaataactccttagccattattatttaaaatggactcagagatcatagcaaatatcccattttcatcaccaaatgaaaaaatttcaaaaatgtaattgaaaatactcacaaaactccacagagaatactcgcgtgaggttttgttaaggcaaaggatatggtgcagcaagagaaagaatgcgtgcccatatgctatgtcagacacaaatccaggcagttttccagactcccattcatacactgatatgattcacttccagatcaagccaccaatatctgagagagaaatgctggcttcaggagagctcaagtcagaggatcccagcagggattttatacccttctggggtaacacagttgagccagagtgcctacctaatcatgtatgccaaccagaaaccatcagcagtcaaacttgccctccatattgtcatgggatcttccagatgttaaacaataataataaagctcactgcatttaaatgtcaaaatgagatacctaaagtccctacagacaaaactagagcttttccagtccaattttaaactaattccatctcacacaaaacaagtgcacactatatcaaaatttgggggatactgctaaagcagtacttacagggaaatttatagcctatattattatacaagaagagagttcacaaataaatgacagttcattttaagaaattaggaaaaccagccaggcatgctggctcatgcctgtaatcccagtgctttgggatcacttgaagccaggagttcaagaccagcttgagcaatacagtgagactccatctccaaaaacaaaaacaaacaaaaaagttagccaggtgtgatggcacatgcctgtaatcgcagctacttaggaggctgaggattacttgagcccaagagttcaaggttacagtaagctatcatagtgccactgcattctatcctgggttgacagagagagaccctgtctcaaaacaaaaaagaaaactgggaaaacacagacaaatcctataggcaaccctatatagactctatcctctcttgcctcttgcttcaggagcagccctgcctcagtgacagcaaaaagtggcaaccaagaaagctatttccacatgattcaccaggaacactggctaagttgcaaagccatgtccctgaaatgctagatcttccttctttcaatcttggttttcctacccacttacacacccagcaatggtctttttttttttcttttttttttttttttgagacagagtctcgttctgtcacccaggctggagtgcagtggtgcgatctcggctcactgcaagctccgcctcctgggttcatgccattctcctgcctcagcctcccaagtagctgggactacagatgcccaccaccacgcctggctaattttttgtatttttagtagagacggggcttcaccgtgttagccgggatggtttcaatatcctgacctcgtgatccgcccgcctcagcctcctaaagtgctgggattacaggcgtgagccactgcacccagccccagcagtggtcttgagttgagccatctagagtctatgggaatccacaaaatgtttagatttgccctgggagtgatgctgaccacaaaagagacatagctgtggaagttctgaaactttctgtatactctcatcctatatagccatagtatgggaacatctgagcatgtacctttagaagtggcacatcccaggccaggtgcgtggctcacgcctgtaatcccaggactcgggaggccgaggcaggcggatcacctgaggtcgggagtttgagaccagcctgaccaacatggagaaaccctgtctctactaaaaatacaaaattagggctgggcgcagtggctcacgcccgtaatcccagcactttgggaggccaaggcgggcggatcacgaggtcaggagatcgagaccatcctggctaacatggtgaaactccgtctctactaaaaaatacaaaagaattagccgggtgtggtggcgggcacctttagtcccagctactcgggaggtggaggcaggagaatggcaagaacctgggaggtggagcttgcagtgagccaagattgcaccactgcactcctgcctgggcaacagagccagactccgtctcaaaaaaaaaaaaaaaaatacaaaattagccgggcataggtgatgcatgcctataatcccagctactcaggaggctgaggcaggacagtcacttgaacccagtaggtggaggttgcagtgagccaagatcacgccattgcactccagcctaggcaacaagaatgaaactccatctcaaaaaaaagaagtggcacatcccttgtagtgtgccgcaatctcctcaactccctattagtcatacccagtgtttctataccaattataattaccacctggctcctagaggtcctccagacaaggacacctgcctattaaattctgaacacagactccttgacaagaagcaggggccagcttcccaataagtgcttggaaatatggaacactggatgggaaccagtgaccaaactcatgctcccaggtgctctagaagttgttacaactgatctctcttcatggttacctccaaacctacagtaaaactggcatccaggtcacatgatttgtctcccaaagccctgcagtctgtcttagaagggcttgaacagcaacacaaattaggtcaaagctgtaatcagagctgttctctgccatttgctctaagggacagaaaacaaggactcccacaaaagctgttaacttgttcatgctgagaacacacctgtttcctcaatagactccaaacaataaacagaacccacaacattaatggtggcttaaagaacaggcctttattatcatgagcaatgtgaagcaggcagttccagagctgggtgacttggatattggatatatccataacgagcatcatatgaaatcaatcaacacaggtaagtctctgcaggctatttgcagaatccttctgtgtcctcttgaacaaagctgattatttccatgccatttacatcaaaagagaggaaattaagacccctagtgggctgtgagaccactcacaacaccttttagggactggggagagaagagaggtctgcccgtcacaagcatgctggggtaaatggtaaacgcagtatgattctgccagatggtaggagcagatggctcctgccccagcaaaggccaatagccatttaaaaagtgcaacacagctgctgaaagcatctcacatacttgacactcacagggaatctccccagtgggaatgtccatatctatgaagtttcacttcttactgatggttccctcccaatggctgctcccagagttccactctagggtgagctgttgggctgaacagagacagcacattgcttagactgctaaggcctgtgtccggtgtgaaattcccaatggcgggtaaggttcagcctccaggggaaggctttcctgcatctgctgcactcattaactactgctagttccccaccatatagtaagtcaggggcattggcctaagactttcccccacatttgctacactcttaaagcttttctccagcatgaaccctctggtgcagaacaagtgtctgtttccggatgaattctctcccgcactcactacacacataaggcctttccccagtgtggactttccagtgcctgatgaggttgggtctttgagtgaaggctttcccgcacttgctgcactcataaggcttttctccagagtgaactttctggtgctgaatgagtttggagatgcagctgaaagctttaccacatctgctacactcataatcactgctgtgaattctccagtgtacattaaggtgggagctttggctaaaggccttcccacattcactgcactcataaggcctttctccagtgtgagttcgttggtgcagaacaagtgtgtgtttccgactgaactctttcccacattcgctgcatacataaggcctggctcctgtgtgaacttcctggtgtcgaatgagattagacttactgctaaaaaatttcccacatttgccacactgatagagtctttcacccgtgtgaactcgcctgtgctcaatcaggccggagatttgtctaaagaatttcccacattcgctgcactcgtatggcctttctccagtgtgaactgtctggtgtttaaagaggtcatagctttggctgaagaatttcccacattcgttacactcataaggcctttctccagtgtggattctctgatgccgagcaagtgtgtctttgcgggtgaaggctttcccacattcaccacacctgtgatacctctgtcccatgagaaagccactcacaagcttagtgctcttgtggggcttcatgctgctgagagaggcctgatgctgaagaaggccagatgtggctgaaaagtctctcctacctttcccacatgtgagggtcttctctggcacatggactctgcagcttttcacagagtctctgccctccttccttgggaaaagtttccctccattgggctggttctggtgctggtcaaagtctgtactgaaccagaattgctttccacatgccccacacaagtatggtttctgcctggcttttcccccatggtatttagccaggtgtaaggtatctttcaatattgggccacatatgtcacatgggtgagactccagctctgccatgagagtcctgacctctgacactcctgctacaaaaatgctctgctcagaagatacctcttcatcctccactccatgccaacaacctgaagaacacacaaatgctgattaaatgcatatttacgggtgggaaggggcaacctcattgtatatgtgcatttgacacatgcaggaataagttcatgaaactgttttcagaatgagaggcatggtcagagtgaggaaggaatggctttgaggtagtgagcctctggaggtcataccatgggggagtgccaatgaagggccaggatataagaatggaaccaaacaaatggcttccagtagggccttgactgttagtgactcgtgagtgctatgaaaaatgtatccagtcccaggaaaatccaactacaagtgagcagctggtgttcaaagactatttaagaatatatgcacatcttgtgaacattaattgcaggtcaatactgccaaaaaatgtagacagagaagtggtgaaacatgggtgtaaggtgaaggccagaggtgagggtggcaaggggctaacaaactagaaatgatatatcttcgtgtcaagaacaggaaaggacagatagaaacgctgtgtggccactggccctggaaacaaacactgatgtgaacagttaatgttgccagttttgaacccagctttgacatcgtgcccttccccgatgtccactcaccaggtctaagtcccctctgggcctctctttctgtggctgaagtcatatccacctggtcatacacccagggctcttctcctcgctctagtttcatgactgcacgtgatctggaaaatgcaattcctaagggaaagtcagaacaggtgagcagccagcactggcccatggcaaaccaccctatgatggacttcaggtaagaaaaataacctgggaggagttgtgcaggaataacccaaaggtccctataagtgactatgtaagtgcctataactcctgacaaggtcaggccctagaagatgtcacctgagctgggcgcagtggctcacacctgtaatctaacactttcagaagtcaagtcagggtattacttgagctcaggagttcaagaccagcctgggcaacatggcaaaaccacatctctacagaaaaattagctgggcgtggtggtgtgtgtctgtagtcccaactattcaggaggctgagatgagaggatggcttgagcctgggaggtagaggttgcaatgagctgagatcatgccactgcactccagcttgggcaacagagccagaccctgactcaaaaaaaaaaagaaaagaaaatgtcacctggagaaagggacagaaccttgggcacagaggcatcataattttggacagagtcaccagtacagaaagcgaacagacctagtgagatccactgggcaaaccacaagtctcatgaccccaaacccttggctgcacggcttcaggactactcagcaagtagggaggacactccatacagcttagccctggcatcttgagcacctactccaggaaactggtgaaggaagcggtgctcatgatcccaccataggaagaacagagtggtaaaggcagaaaagcatgaggaccttacccagtgaggctaaaagtgcaaagttctccagcatcacatcatggtacaaaagtctctgagcatcatcaagaagctcccattcttcccgagagaagtatacaaacacatcctcaaagaccacacagccctgcaacaaaagggacaggaaggaccataaaaagtctcttgaccaatgatccccagtctacctacccacaacatcctgctaactaacctcccaggttcccaagtcagagataccaggcactagtaccactgatcctcactctctcctgatcaccccagcaatcactgtgtcagcccaccacaacaacagacaggctgacagataaatgccatttacactctgagccagccaactcccctggggtacccaagatcacaaatcccaggtatgaacctaggctcatttttctcagttaagccccaagtcacaggaccgtcagctcacactccctcctctcatacacatcactctggactatgtctccctcacatctccagcttcccccccaccctactggcccaccccatctccctggactccccaaatgtcactctacacatagcattaagagtgcttgccgaaggcagatcacgaggtcaagagagcgagactatcctggccaacatggtgaaaccccgtctctactaaaaaaaaaaaaaaaaaaaatacaaaaattagctgggcatggtggtgtgtgcctgtagtcccagctacttgggaggctgaggaaggagaactgcttgaacctgggaggcagaggttgcagtgagctgagatcatgctactacactccagtctggcgacagagtgagactccatctcaaaaaaaaaaaaaaaaagtgcttgccaacaatcagtatcccatcttgctccaaaccatcaatggccccattgccaaggaaagccctattgttgctctgaaagcctcccaatctggccctgttccttttttcaatcacaggcacctcaaaccacatgcagatctcaggtatcctcaaccctcttccatttctttgttgcacattgtaccactgtttgatatggattggatgtgtatcccctacaaatctcatgttgaaatgcaacccctagtgctggaggcccagggaagccaaaagattggacacccctgatttaaagtgagagatgtgtaactactcctttaacttgaactcttagaggccactgtagggttattaactgacctgatttcaatattgctgtgtgtcagggaataggaacgcttaaagagagggagaaggatggggatcagctggtcagtgaggcagtcagaagacacataacaatttttttttttttttttagacagattcttgcactgttgcccaggctggagtgcagtggcacgatcttggctcactgcaagctccatctcccaggttcacaccattctcctgcctcagcctcccgagtagccgggactacaggcgcccaccaccatgcccggctaattttttgtattttcagtagagacaaggtttcaccatgttagccaggatggtcttgatctcctgacctcgtgatccacccgcctcggcctcccaaagtgctgggattacaggtgtgagccactgcgcctggccgactttaggcatttgacacagatctctaactaacttaatgcaggcagcaggagataaatacccatgctcagctgcatcatgaaaacggaagaaactggaacacattcaacaccctcaacacattccagctacatcaaaagagtctggttcctaccttctggccttaggataatgacagaatgtagtacatcctaagttccagagagttaccaaaaacagagacagcattctggacaaacacaaagattagagaagcaccttaaatctttggccagatggattcgtgagatccttctactacactaggcaagactgggagaagtagtgaacttttttttttttttgaaatggggtctcagccaagcatgatgactcacacctgtaatcccagcactttgggaggccgaggcgggtggatctcctgagggcaggagttcgagaccagcctggccaacatcgtgaaaccccgtctctaccaaaaatacaaacaaattagctgggcgtggtggcgggtgcctgtaattccagctactcaggaggcagacaagagaattgcttgaacccagaaggcagaggttgcggtgagccgagattgtgccactgcactccagcctaggaaacgtggtgaaaccccgtctctactaaaaatggaaaaattagcggggtgtggtggtgggcacctgtaatcccagctactcgggaggctgaggtaggagaactgcttgaacccaggagacaggttgcagtgagccgagatcgcgccactgcactccagcctgggtgacaagagcaagactccatctcaaaaaaacaaaacaaaacaaaacctggccaaggcatggtggctcactcttgtaatcccagcactttgggaggccgaagggagtggatcaactgaggtcacgagtttgagaccagcctggccaacatggtgaaactctatctaataaaatacaaaaattagctgggcatggtgatgcatgcctgtaatcccagctactgggaaaactgaggcaggagaatcacttgaatctgggaggcagaagctgcagtgagccaagatcgcaccattgcactccagcctgggtgacagagcgagactcgtctccaaaaaaaaaataaataaataaaataaaaccaaagccaagtgcagtggctcacaactgtaatccaaacactttggaaggctggggccggtggatcagttgaggtcgggagttcaagaccacctgggccaacacggtgaacgtcccccccactcccccgcccccaccccacccctcccacctccccaccccaccccacccctcccacctccccacccccgtctctactataaatactaaaattagccaggggtggttgtgggcacctgtaatctcaactacttgggaggctgaggcgggagaatctcttgaacccgggaggtagaggttgcaataagccactgcatcccaccctgggcgacagagtgagacttcgtctcaaaaaaaataaaaaaaataaataaactaaaactaaaagaaaacacacaaaatgagggtgagataatcagatagtagcaatagcacaccacccatcgttgccatcccaggccaaactcctcataccctacagctctctcctcctgcaaacactgaaaagaaccctttcaaatggcaggacccttctcttctggggggagtctcaagaatgcccactccctcttccctgccctgcagtcccagccttctcatctcttaccccagagatatgaaataacatacttaagactgccccacttaaatctgacctcctggccttgacctactccagaccgctcccttcaccccaaagatattctaagcccagccccttccccacaacttcagaccttcctctctagttgcctaagtgaggaagcctccactctgagacatctcaaagtcaccattccaaaatccaaacgttcatggaaaaacaacaaaaacaccttgctctttcatgccttactttcagtcatagctgcatatgatggagcagaaaatcctgttggtttcaaatttaaaacctacccagaatatgatcacttctacccactcacctgccattactcttggtacatccaccaccaaagcattcctggaatccactgcagtagcctccttaccggtctcctcgtatccatcctcgcagtccccaccccaaactaatgttctcccctgagcaaatttcgagacacttaaaatcccagctaagatcacgtccttctattcaaaaccctcagttaatctcaacgccctcagaatgaagcgacaacttctcagcctgccattccagtcacagttcctcaaactctgctctgtgttgatgagaaccctgtctcccaaatgtttgggggtcagcagcacccccgagcctttacctgcgccgtcccctccgcccgtaactctcccacacccacccacaccgagataggaccccgccccaagagtgcgtcgctgtcctgggacacaggggctgcaggcactttacgattcggagtcggagaaagggtgactgagggcccggaggacgcagcacccacccgcgcggagtccgttagctccgccataggaccgtgggcgcggacagctgccgggagcggcaggcgtctcgatcggggacgcaggcacttccgtccctgcagagcatcagacgcgtctcgggacactggggacaacatctcctccgcgctttcccaacacctccacctgcggcccacacaagcgttacagaaccccggccagggacagcctgacagaaacaaaatgtccgctacaaggaggagccggaagtcccgcccacgcaccccccgcaggcactgaaacacccctctcctgggccctcattgggtatgcaacgtataggtttgtgggtagagtgtggttcccactgagctatccttcaaggcaggggattctcggcctgggctcttgggaaaactcgaagtaggagggccaagttgtttgggaaaagtaacccgagtttcaaagggctgacaggacttccgtcctcttttttttttttttttttttttttgagacagagtctcgctctgtctcccaggctgcagtgcagtggcgcgatctcggctgactgcaacctccgcctcccgggttcaagcgattctcctgcctcagcctcccaagtaattgggactacaggggcccgccaccacgccaggctaattttagtacttttagcagagtacgggatttcaccatgttggccaggctggtctcgaactcctgactttgtgatttgcctgcttcggcctcccaaagtgctgggattacaggagtgagccatggtgcccggctgacttctgtcctcttaaaaggcctggacctagattccctggagtgtagtatgcaccgatcgcagaaatgttgagacatttcagatgttccccaaagctgcaaaactaaatagatacaccacaccacaatgtctctttgcgtacactcacagctagaagctaataactattaccttgttgctttttaaatatgtgtgcactcaagctttacagtaacttttgtgagcttcagtttggtcagagacggaagagaaaatattccaaacaaggccttggagtggaagaaggaagagggatgatgtggagtctccctgaaaccagtggacagatttcttcagaaaactcttcctgcctgggtaatcagtgatgtctccatcacagcaaaacacagtgcaattaccatttaacctgtcattgtcattgtaagtatggtgtctgtgttaggaggtgagattatccccgggggaaaaatcctgacagctattaataatgattccgtagttatttgaagataatgaaagaaattgctctaaggaaatatctgtgatagatggacaaagttaagatctcagtaaagtttgagcctgaatactaaagtataagtgaaagaatgaagttaagcatatggttgtgttgtgatcttgaccacactttgtcaacaaaatgtgactcttttttcctgaaaatgctgagcaattgtaaagaagatatcagaatggtaaaaatcaacagtgaagttgtgctgtcttgataattcactgttaaaatacacatccaaggaacacatacgagctctcagtaggtgtttttcaaatgtgttagtagcatgaaagacatcactaataaaatttccaagattcctatacatacaggacatgtcctgcatataatgatttttgtcctgcatcaccttttgactttgtcacaataccctaaataaatattctaaagaaggcaacagtcttaaagaaaagaattttcaacccggaatttcatatccagccaaactaagcttcataagtgaaggagaaataaaatactttacagacaagcaaatgctgagagattttgtcaccaccaggcctgccctaaaagagctcctgaaggaagcactaaacatggaaaggaacaactggtaccagccactgcaaaaacatgccaaattgtaaagaccatcaaggctaggaagaaactgcatcaactaatgagcaaaataaccagctaacatcataatgacaggatcaaattcacacataacaatactaaccttaaatgtaaatgggctcaatgctccaattaaaaggcacagactggcaaattggataaacagtcaagacccatctgtgtgctgtattcaggaaacccatctcacatgcagagacacacataggctcaaaataaagggatggaggaagatctaccaagcaaatggaaaacaaaaaaaggcaggggttgcaatactactctcggataaaacagactttaaaccaacaaagatcaaaagagacaaagaaggccattacataatggtaaagggatcaattcaacaagaagaactaactatcctaaatatatatgcacccaatacgggagcacccagattcataaagcgagtccttagtgacctacaaagagacttaaactcccacacaataataatgggagactttaacaccccactgtcaacattagacggatcaacaagacagaaagttaacaaggatatcgaggaattgaactcagctctgcaccaagcggacctaatagacatctacagaactctccaccccaaatcaacagaatatacattttttttcagcaccacactacacctattccaaaattgaccacatagttggaagtaaagcactcctccgcaaatgtaaaagaacagaaattataacaaactgtctctcagaccacagtgcaatcaaactagaactcaggattaagaaactcattcaaaaccacttaactacatggaaactgaacaacctgctcctgaatgactactaggtacataacgaaatgaaggcagaaataaagatgttctttgaaaccaacgataacaaagacacaacataccacaatcctgggacacgtccaaagcagtgtgtagagggaaatttatagcactaaatgcccaccagagaaagcaggaaagatctaaaattgacaccctaacatccaattaaaagaactagagaagcaagagcaaacacattcaaaagctagcagaaggcaagaaataactaagatcagagcagaactgaaggaaatagagacacaaaaaacccttcaaaaaatcaatgaatccaggagctggttttttgaaaagatcaacaaaattgatagaccactagcacgactaataaagaagaaaagagagaagaatcaaatagatgcaataaaaaaagacaaaggggataacagcacccatcccacagaaatacaaactaccatcagagaatactataaacacctctacgcaaataaactagaaaatctagaagaaatggacaaattcctcgacacatacactctcccaagactaaaccaggaagaagttgaatctctgaatagaccaggctctgaaattgaggcaataattaatagcttaccaaccaaaaaaagtccaggaccagatggattcacagccgaattctaccagaggtacaaggaggagctggtgccattccttctgaaactattccaatcaatagaaaaagagggaatcctccctaactcattttatgaggccagcatcatcctgataccaaagcctggcagagatgcaacaaaaaaagagaattttagaccaatatccttgattaacattgatgcaaaaatcctcaataaaatactggcaaaccgaatccagcaacacatcaaaaagcttatccaccatgatcaagtgggcttcatcccaggggtgcaagggtggttcaacatacgaaaatcaataaacgtaatccagcatataaacagaaccaaagacaaaaaccacaggattatctcaatggatgcagaaaaggcctttgacagaattcaacaacccttcatgctaaaaactctcaataaattagatattgatggtaacgtatctcaaaataataagagctatctatgacaaacccacagccaatatcatactgaatggacaaaaactggaagcactccctttgaaaactggcacaagacagggatgccctctctcaccactcctattcaacatagtgttggaagttctggccagggcaatcaggcaggagaaggaaataaagggcattcaatcaggaaaagaggaagtcaaattgtccctgtttgcagatgacatgattgcatatctagaaaaccccatcgtctcagcccaaaatctccttaagctgataagcaacttcaacaaagtctcaggatacaaaatcaatgtgcaaaaatcacaagcattcttatgcaccaataacagacaaacagaaagccaaatcatgagtgaactcccattcacaattgcttcaaagagaataaaatacctaggaatccaacttacaagggatgtgaaggacctcttcaaggagagctacaaaccactgctcaatgaaataaaagaggatacaaacaaatggaagaacattccatgctcatgggtaggaagaatcaatatcgtgaaaatggccatactgcccaaggtaatttatagattcaatgccatccccatcaagctaccaatgactttcttcacagaattggaaaaaactaccttaaagttcatatggaaccaaaaaagagcccgcattgccaagtcaatcctaagccaaaagaacaaagctggaggcatcatgctacctgacttcaaactatactacaaggctgcagtaaccaaaacagcatggtagtggtaccaaaacagagatatagaccaatggaacagaacagagccctcagaaataatgccgcatatctacaactatctgatctttgacaaacctgaaaaaacaaacaatggggaaaggattccctatttaataaatggtgctgggaaaactggctagccatatgtagaaagctgaaactggatcccttccttacatcttatacaaaaattaattcaagatggattaaagacttaaatgttagacctaaaaccataaaaaccctagaagaaaacctaggtaataccattcaggacataggcatgggcaaggacttcatgtctaaaacaccaaaagcaatggcaacaaaagccaaaattgacaaatgggatctaattaagctaaagcacttctgcacagcaaaagaaaccaccatcagagtgaacaggcaacctacagaatgggagaaaatttttacaacctacttatctgacaaagggctaatatccagaatctacaatgaactcaaacaaatttataagaaaaaaaacaaccccatcaaaaagtgggcaaaggatatgagcagacacttctcaaaagaagatatttatgcagtcgaaaaacacatgaaaaaatgctcatcatcactggccatcagagaaatgcaaaacaaaaccacaatgagataccatctgacaccagttagaatggcgatcattaaaaaatcaggaaacaacaggtgctggagaggatgtggagaaataggaacacttttacattgttggtgggactgtaaactagttcaaccattgtggaagttggtgtggcgattcctcagggatctagaactagaaataccatttgacccagccatcccattactgggtatatacccaaaggattataaatcatgctgctataaagacacatgcacgtgtatgtttattgtggcactattcacaatagcaaaaacttggaaccaacccaaatgtccaacaatgatagactggattaagaaaatgtggcacatatacaccatggaatactatgcagccataaaaaatgatgagttcatgtcctttgtagggacatggatgaagctggaaaccatcattctcagcaaactatcacaaggacaaaaaaccaaacactgcatgttctcactcataggtgggaattgaacaatgagaacacatggacacaggaaggggaacatcacacactggggcttgttgtggggtggggggatgggggagggatagcattaggtgatataactaatgctaaatgatgagttactgggtgcagcacaccaacatggcacatgtatacatatgtaacaaacctgcacgttgtgcccatgtaccctaaaacttaaagtataataataattttaaaaaagtctattcaaagggataatatcgagaatttcccaaagatattaggaaggattatctttccaagagaaagatatcaatattcaagtacaagaaggccgtagaataccaagcagatttaacccaaagaagactacctcaagacatttagtaatcaaattaccaaaggtcaagggtaaagaaaggatcctaaaagcagcaaaagaacagaaacaacacacaaaggagctccaatatgcctggtagaagacttcccagtataaaccttataggccaggagagagtggcatgatggatttaaagtgctgaaggaaaaaacttttatcctagaatagtgtatttgctgaaagtatccttcaaacatgaaagagaaataaaaactcttctggatgaacaaaagctgaaagatttttgtcaacaccagacttgtcttacaagaaatgttaaagggagttctgcaatctaaaaggatgttaatgagcaacaagaaatcatctgaaggcacgaaactcactggtaatagtaactacacagaaaaaaaaaacaatatagtagcaatgtaactgtgatgtgtaaactcatatcttgagtagaaagactaaaatatgaacctatcaaaaacaattccaacaagttttcaagacatagacagtacaataagatatacatagaaacaaaaaatttaaaagctgggtgacatagttaaagtgtaatgtttttattagtttttctcttgtttgttatttgtttatgggatcagtgttgtcatcagtttaaaataatgggttataagatatagtttaccatggaagcttcatggtaaactaaattcaaaaacctacaacagataccaaaaaattttttaaaaagaaattaaaatatacaaccagagaaaatcaccttcacaataaggaagacaggaaggaaggaaagaaggaagagaagaccaccaaacaacatggcagcagtaaatccttacttattaataaaacattgaatataaatggactaaagtctccaatcaaaacacacagagttgctgaatgaataaaaataaagacccaatgctctattgcatacaagaaacacccttcacctataaagacacacatagattaaaataaaaggatggaaaaagatatttcatgccactggaaacgacgaaatagcaggaataactacatgtatatcagaaaaatagatttcaagagaaaaactgtgaaaagagacaaagtcattatatataatgctaaagggatcaattcagcaagaggacataatctttgtaaatatatatacactcaacactggagcacccagatataaaagtaaatattattagagctaaagagacagatagagtctgacacagtgatagctgaagatgacaacaccccactttcagcattgaacaggccttccagacagaaatggacttaatctgcactatagaacaaatggacctaatagatatttatagaacatttcatccaacagcttcagaatacctattcttctcagcacatggatcattctcaaagaaatactatatgttaggccataaaatatgtcttgaaacttttttaaattgaaataatatcaagtaccttctctgaccacaaggcaataaaagtagaaatcagtaacaagtggactttcaaaatgctacaaacacatggaaattaaacagtcgtcttctgaatgaccagtgggtcaattaagaaattgagaagttgggctgggcatgatggctcacgactgtaatcccagcactttgggaggtggagccaggcggatcacgaggtcaggagttcaagaccagcctgaccgacatgatgaaaccctgtctctactaaaaatacaaaaattagccgggcatggtggcacacacctgtaatcccagctactcaggaggctgaggcaggagaattgcttaaacccaggaggtggaggttgcagtgagtggagattgcgccattgcactccagcttgggagacagagtgagactccatctcaaagagaaaaaaaaaaaagaaagaaattgaaaagttttttgaggccaggcgcattggctcatgcctgtaatcccagcactttgggaggccaaggcaggtggatcacctgaggtcaggagttcgagaccagcctgatcaacaaggtgaaaccatgtctctactaaaaatacaaaaattagtcgggcatggtggcgggcgcctgtagtcctagctactcatgaggctgaggaattgcttgaacccaagaaggtggaggtggcagtgagccgagactgcgccgctgcactccagcctggatgatggagcaagactctgtctcaaaaaaaaaaaaaagaaaagaaaagttttttgaaacaaatgataatagaaacacagcatgccaaaatctgtgggatacagaaaaataagtactaagaagaatgtttatagctataagtgcctacattacaaaagtaaaaaaaaaaactttaaataaacaacctaataatgcatcttaaagaattagagatgctagagcaaaccaaacccaaagtgagtagaagaaaataaatagctgggcgcagtagctcacgcctgcagtcccaacactttgggaggctgaggcaggtggatcaccggaggtcaggagttcgagaccagcctgaccaataaggtgaaattccatctctactaaaaatataaaaattagccagacgtagtggcaggcacctgtagtcccagctactcaggaggctgagacaggagaattgcttgaacccgggaggtggaggttgcagtgagccaagatcacgccactgcactctagcctgggcaacagaacaagactctgtctcaaaaaaaaaaaaaaaaaaaggaaaataaaataataaagattagagcagaaataaatgaaactgaaacaaagaaaacaatacaaatgtgttcaacaaaatgattttttttgtttgtttgttttttgtttgttttttttgaaatggggtcttgctcttatcacccaggctggagtgcaatggcaggatctctgttcactgcaacctctgcctcctgggttcaagcaattctcctgcctcagcctcccaagtagctgggattacaggcacccaccaccatgcccggctaatttttgtatttttaatacagacggggctttgccatgttggtcaggctggtctcgaactcctgacctcgtgatctgtccacctcggcctcccaaagtgctgggattacaggcgtgagccaccacgcccggccgagaaattggttttttgaaaagtaaacaaaataaaaaatcctttagccagactaagaaagataaaccaaataaaatagaagtgagaaagaagactttacagccaatactgcagaaattcaaaggatcattagaggctactatgatcaactgtatgccaaaaattggaaattatagaaaaaatggacaaattcctagacacatataacttaccaagatgaattatgaggaaatccaaaacctgaactgacaaatagcaagcaatgagattgaggctgtaataaaaattttcccagcaaagaaaagcctgggacccaatggcttcactactgaattttaccaaacatttaaagaactaaccccaatcctactcgaactattcccaaaaataagaggaggagaaaatacttctaaattcatcatacaaggttggtattaccctgatactaaaataattttttttctatttccatttcaataagaaataagaaaaagtaaaacaaagacatatttgaacctaatatattcttcagtgatatcattcctttactgtaaggaatactttttttttcttttttctttttttttgagatggagtcttgctctgtcaccaggctggagtgcagtggtgcgatctcggctcactgcaccctcctccgcccaggttcaagtgatttcccctgcctcagcctcccaagtagctgggactacaggagtgcgccaccacgcctggctaatttttttgtattttagtggatactgggtttcaccatgttgactaggatggtctcgatggcctgaccccgtgatccgcccgcctcgggctcccaaagtgctggtattacaggcgtgagccaccacgcctggccggagtacttgtttttcaataccacaggagctatgagctggtcctccattttgtatcaaagaatgtgtccccaggtgacaagatgcagattccaagacattgaatcaatatgatgccaccatcgctttctttctgttctatgacatctttctagtcttaccttactatttccttggctctcagttggtttttcctgagttctcagaaattgaaataatacacactttgtagaaataagaatttcatgttagtcaagtctctaggatagccatgggctccacttaattatctcagaacttacagccccatgtcctctgctcactatccattgagatttatgtgttctcagacttcacagaaacttttctagctacttatgtcattctcagtggtaacttcatttatccacaatattaactaattttctcagtccaagctgttttccagaggtaatctccagtccccatgccgaaactatcattgtacttactgctgaaatgatagttccttcccagcaagaaggtgagattattgtacccagaatcttttctcagggttcaaatatccactttccccatggcaggaatgctgacactccagccacggttttgtaaatgtgaattagtaaataccaactattcccaggtgagtgttgtgggcagcaagctacccaggtgctgaggcaagagaccgagggcatgagccattccagtataataaaatatataaaacaacaagagttatactagatctagatcatagatgtaattatatatgaatatcattaatcattagtttgtagcaattactctttattccagtattataataatactcgctctataatcataacctagaaaaaaccaggccatacagagataggagctgaggggacacagtgagaagtgaccagaagacaagagtgcgagccttctgttatgtccagacagggccaccagagggctccttggtctagcggtgatgccagcatctgggaagtctggtctagcggtagccttagtgtcaaggaaaaacaaccgctacttagcggaccgggaaagggagtctcccttttccccggggggagtttagagaagactctgctcctccgtctcttgtggagggcctgacatcagtcaggcccacccgcagttatccggaggcctaaccatctccctgtgatgctgtgcttcagtggtcacgctcctagtccaccttcatgttccatcctgtacacctggctctgccttctagataacagtagcaaaattagtgaaagtactaaaagtctctgatatgcagaaataatggtgtaagctgtctctctctctccctctctctctctgccttggctgccaggcagagaagggccccgcgtccagtggacacatgacccacatgaccttacctatcattggagatgactcacactctttgccctgcctcttttgctttgtatccaataaataacagtgcagctagacattcagggccactaccagtctccgcgcattggtggtagtggtcccccgggcccagctgccttttctcttatctctttgtcttgtgtctttatttctacactctctcgtcaccgcacacagggagagacccaccgaccctgtggggctggtccctacagagtgttacaatcagaaggaaccagttctgctctgaggttgagacatactctgagggacctggagacatggtgcaacctcctctccttgccttatgcctctcctctatatttcctctgaaaccttctttgaatattcttccttccattactgactgaaaatattaagcctcacaaagtccactgtaagatctttaccagtgggaaatgaagaagactgtttaaagtatttgagtggccatttagtgtctttataacattttttggttatgcatttttgtctttttgggggcatgatttgcaaattgagtctctggtattttactaacttgtgtttgatgagtgaaagagttaatacttcctctcccattagtgaaaggaaagacacttcagaaacatgaataaaagattgtaaattggaaatagtaaggtaatcagatatgtaaagaatctaggccaggcgtggtggctcacgcctgtaatcccagcatgtcaagtgattctcctgcctccacctctctagtagctggaattacaggcacctgccactacgcccagtgaatttttgtatttttagtagagacaaggtttcaccatgttggtcatgctggtctagaactcctgacctctggtgatccacccacctcggcctcccaaagtgctgagattacaggcatgagccacagcgcccagcttcctgacatcgcttaatgcataatctcttcacagggtatttccaaagtccaagggctctttcataacacctacaactggttccatcagaaatgtttaaagcataacaaaatatgttatcatcgtccattttttctattgtctcaaaaatatctttgttctttaagcagcttcattgcaatgaaattcccaaatgtgggcgtggtggctcacgcctgtggtcccagcactttgggaggctgaggcgggtggatcatctgaggttgggattttgagaccagcctggccaacatggtgaaactctgtctctactaaatacaaaaattaaaaaaaaaaaagaaagaaattcccaaatttatccccatgacttttagtagttctgtctcatatatctctattaatctacaggtatgactttcctttttaaaattccttttttgtgcggggtgtgggacagggtcttactctgtcacccaggctggagtgctgtgacacaattacagctaactgcagcctggacctccctgggctaggtgatcctcccacctctgcctcccaagtagctgggactacaggcaagcaccaccatgcctggctaagcttttattttttattttttgtagagactgggtttcacaatgttgcccaggctggtctcagactcctgggctcaagcaatccacctgctttggcctcccaaagtgctgggattacatacataaccacaatgcctggccttaaattttattttatttttttattttttttgagacggagtctctctctgtcacccaggctggagtgcaatggtgcaatcttggctcactgcaacctccgcctctcaggtttaagcagttctctgccacagcctcccaagtagctgggattacaggcgcccaccaccacgcccggctaatttttgtatttttagtagagacggggtttcaccatcttggccaggctggtcttgaactcctgacctcatgatccacccgtcttggcctccaaaagtgctgggattagaggcgtgagccaccgcgcctggccaaaattttatttatttcttgaaattgtgtaatttttgtattagaatttattatactctaattttttgtgcatatctctgatatgatttaagttgtttacacatgtataagccataagcaaactagatattcttgaaatgggtgattcaggggtagtcccacataagtgtgtgattatgacacagccagaaacacacagttggattacattctcccagcatgctgtggtacagtctggaagcaaaaatttcaaagagtgtatgctcctggtgtgtgacaagtgcctgagggttatactgcagcacagcctatagacaaaacacatatcccagggaccctgtgtgacaggtgtgcagtatttaaagacctcagtccggcagggcacggtggctcacgcctgtaatcccaacgctttgggaggccgaggtgggtggatcacgaggtcaagagtttgagaccagcctggccaacatggagaaatcctgtctttactaaaaatacaaaaattagccatgggttgcgctcacctgtagtccgagctatgcgggaggctgatacaggagagttgcttgaaccagggaggcggaggttgcagtgagccaagatcatgccaccacagtccagtctggggaaaagagtgaccctgtctcaaaaaaaaaaaaaaaaatctcagtccatcctagaggtgcccctgttatacctataggactctgtgtaagaggcattgggtactggcacctattgacagcctgagccgacataaatatataccacactgacaacaaacccaagagggagagatgtgatccacacaaccagcatattcagaaccccaaggggctgttagacagaatggaggtggggtcatactggccacacagaagcacaaatgctactcagagacttgggcttttaaatttgctgattacaaaggtttagtgggagcataagcagggtataatcaagaaaattttactccacaatagatagaaatataccttccagtgtgtgtagtcataatataattggaacacacaattttaaacttctagacattactgtagagtcctatgttgattaagaatcatcacagatatttctagaaagaagaaagcaaaatattactgatagtgaagatgaaatatgcctatataacttgctgtcatgcaaggtaacatttaggtattgagattctttacatccctgattacattgccatttgtaatttataatcttttatttacatttctaaagcatcttgcttttatgtgcctatatatcatgctgtcatacaagataacatttagaggccaggcatggtggctcatgcctgtaatcccagaacattgggaggctgaggcaggtggatcacctgagatcaggagtttgagaccagcctgaccaacatggagaagccctgtctctactaaaaatacaaagttagccagctactagggaggctgaggcaggagaatcacttgaatccaggaggcagaggttgcagtgagctgacatggtgctattgcactccagcctgacaacaagagcaagaaactccgtctcaaaaataacaaaaatgagagatatcaggattataagtaaaacagcatagtaatacacttaagaatagataatcggtcagatgtggtggctcatgcctgtaatccctgcactttggagagccgaggtggatggatcacctgaggttgggagttggagaccagcctgacccttttttttttctagtagagacaggagaaaccctatctctactaaaaaaaaaaaaaaaaaaaaaaaaacacacacaaccaaattagccgggcgtggtggcacatgcctataattccatctactcgggaggctgaggcaggagaattgcttgaacctgggaggcagaggttgtgttgagccaggattgtgccatagcacttcacgctgggcagcaagagcaaaactccgtctcaaagaaaaaaaaaaaaaaaaaattagccgggcgtaatggcactgtaatcccagctgcttgggaggctgagccctgagaattgcttgaacccaggaggtggaggttgcagtaagctgagattgcctcactgcactccagcctgggcgacacagcaagactctgtctcaaaaaaaaaaaaaaaaaagccgggcgcagtggctcacgcctgtaatcccagcactttgggaggccgaggcgggcagatcatgaggtcaggagatcgaaaccatctcggctaacacagtgaaaccccatctctactaaaaatacaaaaacttagccgggtgtggtggcgggcgcctgtagtcccagctactcgggaggctgaggagaatggcatgaacccgggaggctgagcttgcagtgagcgaagatcacgccacttcctccagcctgggtcacagagcgagattccgtctcaaaaaaaaaaaaaaaaaaacaaaccaccatgcaatgataaataataatggatcattgaggaagaattcatgggacttcattacatagtcctttgtatttgtgtatatatttggaaaaatccattacaaaaggtacaatatgttcttgcatcaataactttatacaggcatactttggagatagaacaggtcaattttttttttttttttttgagatggagtctcactgtgttgcccaggctggagtgcagtggcgcgatctcggctcactgcaacctccacctcccgggttcaagtaattcttctgcctcagcctcctgagtagctaggattacaggtgcccccacccccgccaccatgcccaggtaatttttgtatttttagtacggacggggtttcaccatgttggccaggctagtctcaaactcctgaccttgtgatctgcctggcttggcctcccaaagtgctgggattacaggcatgagccaccgcgcccggccgacaggcttctttatcccataaatatctctaaatcccatcatcaaagaggcagatttgagaactgttctcccacctctgcacttggcagccttgtaaatacatgctttctctgctgcaagactcatcatctcagtgattggcatactgtgagatggacagaacaggcctggttctatatcaatagtgtggaggaattgtttcattttatagaccagtatcgtcagcttcctcaggaacctttactaacatggatagtgagaataactaacttaggggaaacatctttggttttaaataatgcagagtggaagaacatgtttgggttgatgtagtacctacaggtcactcttcaacaattgcagataggtatgtatcatccacacacacaagagtttattcctgaaggaacagccagcctgggtgggtgtataaaagctactctgaagtctgtctactcggaaaagcgggactgtctgactccccctataaatgccaagtggggctccccagatgaaccagcttaatatgcttcccatgcaagccatgtggaactggcattatgatgataggaatatttacctactgaatatgtttattacccaggtcatggtaaatgtcttggtttggggaaccccattttcttgggcaccttatgtaaacttactgctgcaaaattgagctatagtcagtcttaccaaatttgcttcctattatgggcctttcagatgctaataaaaccattagattaattaataagatagacaatgatgaaaggtacaggggagagtcaaacagctccttccaggaaggtagaaatttttaaatagttataaagaaataagacaaataaagaaaacatggataggaatgaaactaagaggaaaaagaaaagggggaaatcatgatactcatcccagcatggtggaaatctttagatggctattagatggaaattagatgaataaaataaaaactgatcggattaaaacaaaattctgaatataacactattgaaggttgggtggaccaaaggaagttcctgttgatcccccaacattaaagggccttaagctaagttgctgtagttcctgaagtttggataaattttaaaagccagaaggtaaagatataatgagaaaccccacctggaatgcctagggtgatggttagactggttaatcaaggtagcacttggaaaaaaggccaaagtctcctggcctgaaccctgggtggaaacctgaagacatctgcacaagaaagggtaaaatggtctggagagaagagtcctgggactacaacataaagtaaaagttgacaggactatgaaagttggaatgttaaacatgcttttttttttttaagttgtactaccaataaactgagttctttccctactttgtattggtcacaaaaaaaagaacacccaatttgggaaaaaaaaaaaaaaaggcaagcaagttttatttctgagcagaaatggagaatgagtaagctcttgctctaaatgcctcttctccctgaacatagaagacataggttttttaagaactgagcggctgggtacagtggctcatgcctttaatcccagcactttgggaggccgagacaggtggatcacctgaggttgagagttcgagaccagcctgaccaacatggagaaaccccgtctctactaaaaatacaaaattagccaggtatggtggctcatgcctgtaatcccatccataacattaatttattaggcaaaacactccttgccatggaaacagaaataaagaatagtcacaaaaaaaaaaaaagaaaagaaataaataaagtctgttttatctaatacaaaaaaaaaaaaatagccacttcccagcaataacatgaactcctggatttaagacacaaccaatatcaacaggtggagagcatcttctgcatacgtgccccacctttgaaaactgcagccatttatcactaccaaaatagcatttctttcattggtcttcctgtaagattgataaatcttagataaattaatccagaattaattgaatataagttggaatctcaagcgagggatactaagtggataaaagtgttgctcaatgtactggacactatgattgattttataggcaggagagttgtcttctgtgggaatcacagacagagattcagcatgtattcctgctttagggaacacaacatttctcctctatcttccttgtcttgtcctatctggattagttctctcttgtccctgacagactgagaaactgactctaatgcctcagagtgcattcatgtgaatttataacacaataatgtttatcagcctctgctgccagtaccgggattttgcgactgaaagactgttcaaaacgttatgataatttggatttttagtctttgggggcatcctaaataataagtttagcatcggagagctcgagttccccaaaatctaaaataatattttttcaaatacttgagtgatcagttacagacactaatctccaaaaatctcaatacgggttctaaggctaggtgagactatcctctaccctagaaggacatgcactttaaggacaggccgctgagatggagctgggcctttcctgcaagtaagtgaacgtgatggtagggtatacctgacagcatagtttgacaggggatatagactttcaaggagaaaatagacatgaaatagatacatgcagaagtatagtcaaattgagggaagatgacacttaggccagagtagtgtttattcaccactctgtgcaatcaagcgcctctgagaaggccttctttaccgccttggaactgtcttggaacctgaggaaactacataacccagaaatctctgcgtcgaatgacagcgcgtcagagccaatgagggctcaaaataaaggcgtttccgcggaaacagtataaaggtgggacttccggcgtcctctactagtggccattttgattggtgttgggtgtattttccagtgagagaccgcggagtgttgggtcgtgtagaagtgactgaacccagaaggtggagacgagacgttgtcccgactgcacagaggctgctctgcagctccttaaaggcgctaggcgtgacccgcaccaaggccgggatcgggaccaccgtgcccgggtacctgcactgctcgccccctcctttcgaccccgctttccccacccagtcggatggcggcggccgcgctgaggcccccggctcaggtaattgtggcgtcttccgtgccctcaggtcacctcatctttacctaagtccaaaagcagagaggaagcggcgcctgctcaaggttttacaccctgaacccggcgtcgggacactgaggcgctctctatgggcccccgtttttgacacccgcgggatgcgctcaggagagctacaggcacagggagcggtgcaggcaaaggcctggagatgaactgagccgagaggatcgtaacctagggtccacaggcacctgtcgggagcaaagtgtgaggcagagctcctcctggaagagcaggctgaggaccgtgtattcaccctgagaacgctggaagccatggacagcttccaacaaaggaaggaaaagatcaatgtccaggctttaaaggtttcccaaagtccagtcgaaaaagaacacaggggatgacttttgggccctgggaggttgaattcttgttcaacctctacagatcagataggtgctaagagatgacattttgtactgaggcgctcagttcagacaaccaactcgcgtttacctagttacagggccaagaaagagttcagggaggcctgagcttatcaaatctcatcagggatacattcttgtagcttgtgcctctcctctcaggaactcctggctgcagaagcacttgcagaacctccgcagggaagcggagggtgttattccctcactggccctaactcctatccacatgctctttagattgggatgtcctgggattcttaggtacctttttttttttttttttaagttttttgatatgggaaccctggaggaaccttaaacccaggatccaaagtctgtgacacaggatatatggaggtattcccatttctgtcaaccagtataaacatacttggaaggttaacccaggagttagtaccaggatgtgaaatgcttagaggtgaaactgaccagagggaggaggtgatgttgccacagtttcatctggctgtagtctcctctggctgtacagtggagaacagactgtggggttgagagaggaggaaataagatgagagttgaggcttttgccgtaatccaagtgagggttaacagactaagattcatggctaaggagatgtggctggattcaaagttgatattttgttacagcatctaggtttcctaatacacaaagtaagggcatgaagagagcaatcaggatcccgaggtttttggtcttagtagctgtagctatggaagctgcatcagctgagatgagcatgttggtaataaacataattagaatattatgcaaatatcaggatgactgttatggccatatgaagagtcagagacgaataagtgtaggcatcaaatggctatggacatgcaggttggggtatctggaaagggattgacactggagacatctaatatatggtagctaatgtgtatgctatggtgagtgagccatgggtcacattaaggagaacacacttcagattctggtggtaaatcttttaggggaccagaaagcagtggttgaatgatgaggactgcatctgttgcttgggtccctgggtaatgttactgggcttcctaaacactggagaggtaggtaagtgaccatgatggtagggtatacctgtcagcataatttgacaggggacatagactttcaaggagagaatagacatgaaatagatatatgcagaagtgtagtcaaattgagggaagatgacacttaggccagagtggtacttattcaccactctgtgcaatcaagatttgagatgactttggtagtgtgtggggggtttcattacacgtgctgaatatgctcagggagaaatatggtcatctgtgacagtaggtcttgggccttaaatggattaaaaacaggactttttttttttttgagacggtgtctcactctgtcgcccaggctggtgtactggtgtatagtggcgcaatcttggctcattacaacctccacctcccaggttcaagtgattctcctgcctcagcctcccggtagctgagaatacagttgcgtgccaccacgccccactaatttttttttgtatttttagtagagatgtgatttcaccatattggccaggctggtctcgaactcctgacctcatgatccacctgcctcagcctcccaaagtgctaggattacaggtgtgaaccaccatgcccatccaggactgctctttaaatggcaatggtattaggtgaatggaagttggtccgtgttgctgaagggtaagccattgtagcacagaagtggaataagaccatggatatctgaagttacatgtggttttgcatggatgtggagtaatgcaaggaggcattcatagaattattagggactaccactgctaatgggaaccatggtcattttgtgttattattggatcctgtttgaatatgtgaagcatattggatgctgtcagccatattgtggtataaagccaaaaatggaggcccaatatgatgtgtcaccttgacatctagtgatattggtatgacctcaaatgacctgagaaccaattcccttcccactaggctcttttagataataatcagcatggcctaataatccttttattagggagaccaggcagaattcctggttattatactttgtagtgagtttcaattttatccttacccacagtgttattcaaacaagccagttgcatcctcctaagggattcgggggtcatcacaccctcttcattttaaaagcttgcatatcatagtttctggttatgcactcttatccatagtgcaacccctatgtggtccttcatgatgagggatgtcctcttctagactttgagtgtatttgatttttaaacatatttatagcacctgtctagtgtttgatgtcatgtgtttggtcattaatataactgtaaggtgaaaatctcacccttactggtagaaggaagaagagggtataaacatactttaacttgtggggaggcagaggccaatgtgggaggcagtttagtgggggtggccatgggcatgtgtctgtgcagtctaaagaatgatgtgtattttggcctagcacagtggctcatgcctgtaatcccagcacattgggaggctgaggtgggtgaatcacttgagctcaggatttcgagactaacctgggcaacatagtgaaaccttctctctaccaaaaatacaaaaaaaaaaaaaaattagccggcacggtggcatgcacctgtatcccatctactcgggaggctaaggccagagaattactcgagcccagtagacagaggttgcagagagctgagattatgtcattgcactccagcctgggcaacaggagtgaaaccctatctcaaaaaaaaaaaaagcaaaaaaaaggaatgatgtgtatttagagaaggagtatgtctgatagactgaggatgctgcattgggatttacatgacttcatctctaccaggggcattggctatcaggaagttatggaccgctttatatcagcaccaaaacatagaaatctattgtttcacccacttcttgtggctgatggctgtacaccatgaccagtgagcccatgagaagatagtgacaccagtgggcctagtttctccttgtagtttaggaccttgggaggaggaagggcaagggtggataagtggatgagcatatggagtgtttgtggtttcatctgtcatcatcacggcagggcactgtgacctttgaagatgtggctgtgaacttttcccaggaggaatggagtctccttagtgaggctcagagatgcctttatcatgacgtgatgctggagaacctgacacttatatcttctctaggtaaggcactcacactcttctctatgacctcagctattgtctgtctgtccccatcttttttccccatggcaagactgttttcctcacttcaggagcctgggcacaggttcctctgttagttccctgggtaggttctatgtggtatgtaggactgaggtgtgtgcactgccctctctctccttgagcagccccaacacctgctttgctgcaagctcccagagaaggagctttacaggcaccataatgcatcccaccttgcttgccctctggctgttgagtaatttttctagatcagagactggtatgcacaggttctacttccttgctctaggtgacatttattcatgactgcctgtgctaggaattcctcccatcactgatgttctcaatacttacatgcaccataggttgttcttgcaagaccctccttataaattatcttgtttgttttgttttgttctgttttgttttcaaagtcttaactctgtcacccaggctggagtgcagtgctgcagtcatagctcactgtagcctcaatctcccaggctcaagcaatcctccttcctcagcctctagagtaactcggactagaggcttctgccatcacatcccactaatttttatttttatttttaatagagatgaggtctggctgtattgcccaggctggtctctgactcccaacctcacgtgatcctcccacctcatcctcccaaagtgctgggattacaagcatgagccagtgtgccctgagtattttttgcttttttgtttttttttttttcagacagggtttcactgtcatccaggctgcagtctactgatgcaatcatggttcacttcattctcagccttctgggctcaagtaatcctcccacctgactcctaagtagctgggactacaggagcatgccaccctgcccaactaatttttgttcatttgtatttttggttttgttttttttttttttttttttttgagacggagtcttgctctgccaccaggctggagtgcagtggcccaatctcggctcactgcaacctccgcttcccaggttcacaccattctcctgcctcagcctcccgagtagctgggaccacaggcacatgctgccacacctggctaatttttttgtatttttagtagagacggggtttcaccgtgttagccaggatggtctcgatctcctgaccttgtgatccacccgcctcgggctcccggagctgggattacaggcgtgagccaccgtgcccggcctcatttgtttgttttgtagagatggtgtctcattatgttacccaggttggtcttgaactcctagggtcaagtagtccttccagtttggcctcccacagtgctgggattataggtgtgagccactgcacctggccaaaaattatctttgtagtatttagttttctttcctatgggctatcatgtgctgattttttctgaactgttggttggctattcttctctcttgtctttctcttattctttatgtcatccatgtctcatgtaaattccatgtatatctttgcagtgggactgagagttctcagtgatccagaagttgcagctaaacccaggctcagcatgatgggcccagagggaggccacctctgaggagtaacaccctggaggaagacataacattagggatttaggaaagtcatgctagaagctctctgatttcacaagtatttacctggcaacatgacgagccatatgctgtttctgtcttccccattcttgagagtttcagacttcaccgttctataccctgtcacttctcctctgatgccagcccaggactaatcttcacatctctggatcccacctggacccatttttctcacatttccatctgcagtggactccaatactggcatatcaattttgtattaggaagtgtgtacacattgctaagccatacctgaccaacagctgctttgttgtactcgtattttcttgtgacacacaaacaagtgtatctttgttgtactcgtattttcctgtgacacacaaacaagtgtatctaacagaggtattactccatggaaataattgcagaaacagaatgttgcctttaggttgaagataagtcttcttcatattactgggttagaatgattacagaatgtagggggccacatgatgtgaaggagccaacaatacatgcactacaggaagcagaggcaattccttcctgtgcaaacatctaaaggaccttcataaagcatgtgggtgctatataaaaggatatgtctaggcccaagtaaatataagtacaacaaagcagctgttgatcaggtatggcttagtaatacttcccttcggaagtaccttgcattttaccagcattttatttcttttaggttgttggtatggagcaaaagacgagacaccttctaagcagaccctttctatacaacaggagtccccactcaggacacattggacaggtgtatgtaccaagaaggtccacctctggggaatgtgtggccctctcctgggagatatcttacaccagggaacacaacacaatcagaaattgaatgggtttggggcatatgaaaaaaaattggatgacgatgcaaaccatcatcaagaccagaagcagcacattggagagaaatcgtacagaagcaatgccaagggaacatcttttgtaaagaactgtaaattccatatgtcacatgagccatttatctttcatgaggttgggaaagactttttgtccagcttgagattactccaacaagaggacattcacacttcagggaagtcaaactttgaaactaagcatgggataccccttcagggtggaaaaactcattacatctgtggagagtccacaataccgtttagcaacaaacactcacttgtccttcaccagagacttctccctagagaaggaccttatgtatgcagtgattctgggaaattcactagcaaaagtaatagttttaataatcatcagggagttcgcactggaaaaagaccttatcagtgtggacaatgtgatgaatcattttggtataaggcccacctcactgaacaccagagagttcacactggagaaagaccttatgagtgtggagaatgtgataaatcttttagtcataagcacagtcttgttgaccatcagcgagttcacactggagaaagaccttatgaatgtgacgaatgtgggaaatcttttagccataagcgcagccttgttcaccaccagcgagttcacactggagaaagaccttatcagtgtggagaatgtgggaaatcgtttaatcacaagtgcaacctcattcagcatcagcgagttcacactggagaaagaccttttgagtgtacggcatgtgggaagttatttaggagcaactcccacctaaaggaacaccagagagttcacactggagaaagaccctatgagtgtaaagaatgtaggaaatcatttaggtacaagtcacacctcactgaacaccagagagttcacactggagaaaggccatatgagtgtagagaatgtgggaaatgttttcatcaaaagggcagtctcattcaacatcagcagatccactctggagaaaggccacatgagtgtggagaatgtgggaaatgttttcatcaaaagggcagtctcattcgacatcagcagattcactctggagaaaggccacatgagtgtggagaatgtggaaagtgttttcgtcaaaagggaaacctcattaaacatcaacgagttcacacgggagaaagacatcatgaatgttgaaaatttggcagatctgttggtaaaaagagcaccctcattcaacattcgtgagatcacactggaaagcacttatgagtatggagaatgtgcaaaatcatctagccaaaaggttggcctcattcaacaatagcaagatcacactggggaaaggctttctgagtgtagagaatgtatgaaatcctgtacatagaagttttgcctcaccaaataccagaagggtcacactggagaaagaccctatagttatggggaatttgggaaattacctaacaagaagtcccacctcactgaacactactgagttcacagttgagaaaggccatatgactgtaaggaatttgtaaaattatttagccagaagagctgcattactattcatcagataatttacaatggagaaaggccacataataatttctcacataataaatgtgagaaatcatttccgtacagctctgcgctccatgttcgtaagagttcacactggacaaagccttatgagagcagcgagtagaaaatcctttgtgggaaaactctggtttcattaaacacaggagagttcatgctagagaaaggcctcaacagtgtagcaaatatggaaagacattcactagaagctctgccctgcaagttcacactagagaaagcccttctcagtgaagtaaatttggaaaattgattagtcaaacctctatgctccttcaaaatcagagttcacactggatcaaggctttatggtgtgacaaatatggcacattctttatctaaatgtctaacatattatgcacagacaagctcctgctgtggaagtgccttttgagtgcagagcatttgcgagggcttcactcttctttcactggataccagaatgttgacaggagaaaaataacatagatgtgtgggaatattacttcttgtccagtgtaactgtgggagagagcccttatgaggacaccatcaacctatattgaatgtcatatgtccagtagctgcataaattccaggtatatgggagctgtattgcatttcttatcctgcgtatgtccttgccagatttatttcattcttaggtctctggcaaaagccatttcatctctaccacttggcaggtacctacagtgcatcactcatgcactccatcatattccagaaaaaaagttcaagttgtctcccattcagcagtggtatttttgagtagcctctgcactcgttcctttctcatttctctatgaagagttaggccatggacctgactcagttctggcctagagcagaagtgtccaatcttttggctttcctggtccacattggaagaagaattgtcttgtgccgcatatgaaatacattaacactaatgatagctgatgaacttttttaaaaaatcacacaaaaaccctcataatgttttaagaaagtttacaaatttgtgttgggctgcattcaaagctgtcctgagatacatgcggcccacaagctgcgggttggaccagcttggcctagagaatttttctgattacttgacaagatgggctgtctttcctaggaatctcatgattgtcatgattcttaaaatggaattttccagcctcttaactcaccaacccaagtacaagctgcctctcattgttctggtttctgctatgatgaagtccttatttaagcttccttcaatcttgggaattgtattgactgtattgtgtgaattgtatactcactgcattgtgtggcttagatacaacatggttctggtaccatgaaggattctggtaccatgaaagtttgttggggttactaaactgtgtgactcttagggaacagtatgaaggcagaatatagctctgcatttgtggcctagtttggatggctgcctaaggcctccaaataaagacttcagggctttgtgatctttatttttagatgaaatagtgcaataatatgtgttttcataaatcaacctgagtaggggacagttttagtgacacactttggtgcttctgagaacagcacaaaattattctcttgtttataatggatattgcattctgctcagtactggtgagggaaatctgttctcaagtcctacagtgcattcatgtgtcctgaagtccagaattctgtaggatagtgtcctacgttataagcctggagaaagaaatcataattctttaatttttatttttttagggaaatgatgtcactctgaaactcaggctggaatacactggcatggtcatacctcactgcggcctcaaactcctgggctcaagtgatcctcctgcctcagcctcccgagtacctgagattagcccaggtaatttaagaattttttatagagatagggttttgctattttaccctgactgatgttcaactcctggcctcaagtaatcctctagcatacgcccttgaaagcactaggattacaggtgtgagccaccatgcccagcccaaaaataatttttgtagaattagcatttctaggtagtgaagcagactgcaacagaatagttgggatatactttttttaaaaaggcatccacaatgattcagtcactatgtctgtgatggacaagcaggtacagaaattttcaggacctccataattatgaatctagtgtagcttaggtcattgtcagactaaatctaaaggttttgtggatttctgtagcctatctgggctgcataccaaaaagccatccctgaattagtaggaggaagaggatagggagaaaggaaatctcttagtccagtgatgtggcctttgcaaccagccagcattccaatttaatcaggtggaaatgatcttcctggctcataagtatttggtatcacacaggctaattgccccccttagggcgtgatgagagttaggagagtcaatgtaaaatcacataacctatttgtcaaaaataatgttaaatccagatagttctttcaaattaaatttttaaagctgtaataagactgggcatggtgactcatgcctgttatcccaacactttgggagtccagggtgggagtattgcttgaggtaagaagtttgagactagcctgggtcccatagtaagaccctgtctcttaaaaaataaatactatctttctctctggcctctccatgctccagacaatcactgaattacaatatttgcttaacagtagattaatgtcaattttctggaattttatatgactgatataacatgtttcctcttttcatacctgagtactctcctgagccctatttatttagatgttcttcttttttctttattattatttttatttcacatagcagggatgcatattttgacattcatcaatcatgatatatgagtagttcattctttttatcttagaatatgacatgctatggaaatcactgtatacgaattcatctgcttatggatatgttattgcttcttatttttgtctgttaggaataaaactgcttgttaagcacatttgaatgcaattcttcatatagataaggtttcatttctcttgtttgaatgccttggtgtgcagtgcccaactcacatggtagatgaatgtatacccctctcccaactccaggccgcacagcttacagctccaagagagactccttccctccacttgaggagaggagagggaagaataaagaaaactttgtcttggaacttgttccagctcagctacagtaggatagggcaccaggctgaggcccctattctaggccctagctctgaatgacatttctagatataccctgggctagaagagaacccacttctttgaaagggaggatccagtcctgggaggatccatcacctgctgactaaagagtcattgggccctgaataatcagcagtaatacacaggcagtactcaccatgtgccattggtgagactcagacgctggcttcaggtgtgacccagcacattcccagctgtgatggctttcaggaatgactcctgcttgagaaacagaagagtaaagaagactttgtcttaccgcttagataccagtttggccacagtagggtagagcaccaagtaggctcttagggtccctaatttcaggccttggctcttggatggccagaggaaagcccactgccctgaacagtgtcccaagcctggcagcactcaccacaagcctgtgagtcccacagtcctggactggtgaggaccatggggagagacacctctgcttgtgaaaacaggagggaagagtgagaaggattttgtcttatggcttgggtgccagttcacctgcagtagaacaccagatagattcctaaggtttcccactacaggctctggctcgcagatggcttttctgaatgtgcctaggatggggaggagcttgccactctgaagggaaggacataaacctcgctggttttgccccctgctgattgtagagtcctagggccttgaacaaacagggagtagccaggaagtggtcagtatgagccttgggcagcacccagttctctgctggctacaggtctgaccccacatagtcccattggtggtggcacaggggtacttgtgttactgctcctccagctaaaggcagctcagcacaaagaaactttggaaacctgccagcaggagactcaatgacccccatgaacacttgagctggcagggagagctgcttagagaagtggtagggacagaactccagccagtgcagagcccagaggatttggggtgggagcatctctagtggagcacagctagacacgcccatatttcaaggttcgccttgcttccctaacagactttagccctagggaagtcagacctgatcagtgcagggcgttcttgccgataagttggggatggttggacctgagcacctcttggtcagctggcctctcccagggctccaggctacccacacctgcttgcagtgcgacctcggttgcccaggtggggtcccttatgggggtgtacatcatagctcctgtgctggtgaactgcagttgataaatcccatagtcgtgcaacagcccacctgcaccttcccaaaactgcggcctctctgagacactttgcctgcatgcattcacctatggccacccccgacgttgctttgccagcatatgtgcatgcaagtggaccttgccttctcttttccaccagcatgcgtgtgcatgtgcaccctgtcatgctacagctgccagtgtgagcacacctcatccccccaacttttcgctgcaccaccattgctgtcagagcatttgcgatcccagagactgccagcccgcacctgccagcaccccacccctggaccagcacaaaactacacagacgagcagacacactccactcaccagtatcagctgctacccacgtgaatgcatgcacagagggtacaaacagtcctgcacctgccagcaccttgcctccatattaactccactgctggtgtgaatgtgtactgggacatcaatggaacccccttccctacccccccatgttgtgctgccaccaccagcactgtgaacactcacgtggaggctggcacccctacacccaccagcactccatcgcagccaataaacgtacaccccaccactgccattgctgctggcatgtgggaacaaggatggatcctgctgccaccaccctaagcactggggctggcactgcccttcagagtgttgttaccaatagtctgggaacaacttgaccctccagcatggcaggtttctgacctccagggatcataggacaaagctggatgcctgataccaggccccgtgtattagagcacacagtctagtagtcctgagctgagccttggacccctaaaatgctccagaaattaagacagttgactggagccacattataccacaaactcttaagggcaccaaaaaggataaaagaaaaagaagtccatccaaagttcagcaacttcaaagattgaagaaatatcagccaacaaagatgagaaagaaccagggcaagaactctggtaaccgaaaaagccagagtgtcttcttacttcaaaacaaccacactagttccccagcagtagttcctaaccagactgagatggctgaaataacataaataaaatccaaaatatggataggaatcaagatcattgacatacaggagaaagtcaaaaactaatccaaggaatctattgattacaataaaataatacaggagctgatagacaaaatggcctttataagaaagaaccagactgacttaatagagctgaaaaatgctctacaagaatttcataatgcaatcacaagaattaaccgcactgtgggaggccaaggtgagcagatcggttgaggccaggaggttgagaccagcctgaccaacatggcaaaaccctgtctctactaaaaaaataataataatacaaaaaattagccagttgtggtggtatgtgcctgtagtcccagctgtttgggaggctgaggcatgagaattgcttgaacccaggaggcagaggttgcagtaaaccgagattgcaccactgaactccagcctgggtgacagagtgagattccgtctcaaaaataaaaatcaaaaaaagagagaatgctgaatatgggatccagtctcttttgtcttgtaggatttctactgacaggtctgctgttagcctgacagggttccctttataggtgacctgtcccttctatctagctgcctttaatattttctgtttcatttcgacctggaaggatctgatgactatgtgtctcagggatggtcttctttgtagtattttgcaggggttctctgcatttcctgaattttaatgttggcctccctagcgaggtcggagaaattttcatgagtgatatcctgaaatatgttttccaagttgcttggtttctctccctgtctctcaggcatgccaaagagtcataggccactttatataatcccatatttcttgaaggttttcttctgtgttgttttttcttttcttttcttttttttattttgagactgagtcttgctcttgtcgcccaggctggagtgcaatggcgcaacctcggctcactgcaacctctgcctccctggttcaagcaattctccggcctcagcctcccgagtagctaggattacaggcgcctgccaccacgcccagctaatttttgtatttttagtagagatggggtttcgccatgttggccaggctggtctcaaactcctgacctcttgatctgtccgccttggcctcccaaagtgctggaattacagatgtgagcgaccgcaccaggcctgttttttattttccctgagttgtttcagagagccggccttcatgctctgagattttttcctcaacttggtcaattcttgttttttttttttttctttttttttttttttgagatggtgtctcactctatcgcccaggctggagtgcagcggtgtgatctcagctcactgcaagctccacctcccgggttcatgccattctcctgcctcagcctcccgagtagctgggactacaggcgcctgccaccacgcttggctaatttttttgtatttttagtagagacagggtttcaccatgttaggcaggatggtcttgaactcctgaccttgtgatccacctgccttggtctcccaaagtgctgggattacaggcatgaaccaatgcgcccggctcaacttggtcaattctgttaattcttttttttttttcttttttttgagacaaagtcccactcgtgaggtctggatcaagaccgcttttcgggtgacagtgtcaattgtctacagacttagggaaaattttaatggccacaccagtacagatacaggtggctccaaataaaccacttcccaatattaaacagtattcattgaagcaggaagctataagctgggtacggtgttgcacacctgtagttttagcctctgtaagcagacagggaggatctccatggattataggaatataatcaacttgagcaattaccctgttttacagcctcctccccttctgcctgtacctctccaaaccatggtttgaatgcagtcaccttgttgggctaaaacagctcctgacagaccccaagcagtgtagatgaacccaagttaactttccttattaacatgctgaagtctccactctggaaggagctatagcttcattaccataacatgctttctatgtgctggtatgactcactgcatctgtgcaactgggaccccaattctacatgcactgatgcaccttctcccatcaccattataccataaaactctcctgttacttgtcctcagggagacactgctttggagaatactcccagtgtcctctttacttgagccaagtaataaaagtattgatcaatacctgtgttctctggccgggcgaggtggctcgtgcctgtaatcccagcactttgggaggctgaggcggatggatcacctgaggtgaggagttcaagagcagcctggccaacatagtgaaaccttgcctctactaaaaatacaaaaattaactgggcatgatggtgggtgcctgtaatcccagctactccaaaagctgaggcaggagattcacttcaactggggaggcggaggttgcagcgagccaagatcccgccattgcactccagcctgggtgacaagagtgaaactccgtctcaaaacaaacaaacaaacaaacaaaaacctgtgttctcatggaaagtcatttgttatgcaccaggtgaatgaacctggtatttttcaggtaacactactcaggatgctgaggcaggaggatcccttgagcccaggaatttgaagccaccctgggcaacatagggagacatcatctcaaaacaagaagctataataggaataaaacaaataaccaaagattaccttgaaaagggattgattatcccttccaccagtcctaatagtcccatcttcctgacacaaaacctcacaggaaaggatgaagatttatacaagatttgagaactattaatactactgtgattcggccgggcgcagtggctcacacctgtaatcccaacactttgggaggccgaggcgagcagatcacgaggtcaggagatcgagaccatcctggctaacacggtgaaaccccgtctctactaaaaatagaaaaaaaattagccaggtgtggtggcgggtacctgtagtcccagctactcgggaggctgaggcaggagaatggtgtgaacctgggaggcggagcttgcagtgagctgagatcactccactgcactccagcctgggcaacagagtgagactctgtctcaaaaaaaaaaaaaatactactgtgattcctcatcaaccagtagttctaaacccccacactcttttatccaatgtacatgtaaactgtgaatatgtcactggtgttgatttatgcagtgctttttaggcataccaatacaccctgacagtatttgtttgcctttacctagattggatatcaatatatctggactgttgtgcctcaaggttacaccaaaagcccaacttatttttcacacatattaaaggctgacctagctgagctaaatttctcttgttatgcttctccaatctgcataattataaaaaggactccttgcacttcctggaacaaaaagcaaaaagaggtcataagctgtctacagaaaaactccagttttgctttatgagctatctacagaaaaactccagttttgccttacagaactaaaatatttggaacaattaattcctagggagaaactacagatacatctggattgagtaaccggacttcttggataccctactccaaaaagtaaaagacagctttggccaggcacggtggcccacgcctgtaatcctagcactttgggaggctgaggtggatggatcacctgaggtcaggagttcgagaccagcctgaccaacatgaagaaactccgtctctactaaaaatacaaaattagccaggtgtggtggtgcatgcctgtaatcccacctactcgggaggccgaggcaggagaattgtttgaacctaggaggcagaggtttcagtgagccgaggtcgcagcattacactccaccctgggcaacaagagcgaaactccatctaataaacaaacaaacaaaaaaaagacaacaggattttaggcttggctgactactgtcatagctggatgtccaatttttctctaatgccacagactttatatgcattgtagaaagatcagcctaacctcatacactggacatcagaaggacaaataataaataaagaaaaatcttacaagcccccgctttggcccatgcaaattattagctgctgtttttcctttctttgttttttgcgattttttgttcatgtaaggcatggcagttccctgggtgttctaattgaaaaacctggaggacaatgtagggctattggttattatagtcagcaattagaccatgtagtacatgggtgacctctttgtctgagggccatttttgccactgccatgctccttacgattactcagaaaattgtaatggaggctcctcattctatagaagctcttttgaattcacataatacacagcaattttccattaatagattggtttcttatgacaaacttacactgtctgcttcatatgctgccctctctatctgtaatactcttaatcctgcagtgcaacttcctgaaacaacagatgaaatatttcatcactgtattctactcacagaattggtgtccagacaggatttataggacacatcatgtaaaaatgttgatattatctggttcacagatggatcggatctaaaggatacattttgaaaatactgagcaggctacaaccttgtgtctcttgtggacatcagaaagagcaatcccaccgggtgcggtggctcatgcctgtaatcccagcactttgggaggctgaggcgggcggatcacaagttcaggagttcaagaccagcctggccaatatggtgaaaccccgtctctactaaaaatacaaacattagccgggtgtggtggcaggcgcctgtagtcccagttacttgggaggctgaggcaggagaatcgcttgaacctgggaggcagaggttgcagtgagcctagactgcgccactgcactccagcctgggcaacagagggagactctgtctcaaaaaaaaaagcaaaaaaaaaaaaaagccatcacttgcctcaagtaaaatcagcacagctagctgaattaacagcactcaccagtttgtcaactggccaaaaatcaaatggataatatttatacttaaaggtattatgctattggtgtagctcatgaccttgggatgttatggaatcaggctttttttttttgatacagaggcttgctctgttgcccaggctggagtgtagtggtgcaatcttggctcactgcaacctcctcctcccgggttcaagcaattctcctgcctcagcctcccgagtagctgggattacaggcgctcgccaccacccccggctaatttatttatttatttattttttagatggagtctcgctctggctggagtgcagtggcgcaaactcggctcactgcaagctccgcctcccgggttcacgccattctcctgcctcagcctcccgagtagctgggactacaggcacccgccacggcgcccagctaattttttgtatttttagtacagacggggtttcaccgtggtctctatctcccgacctcatgatctgcccacctcggcctcccaaagtgctgggattaaaggcatgagccaccatgcctggccaatttttgtatttttagtagagacaggttttcaccatgttggtcaggctggtctcgaactcctgacctcatgatccgcccccccaccccccacccccccactgtcccccaaagtgctaggattacaggcatgagccactgtgcctggccagtgaggttacttaacctcccccagatatctaattaaacatggctctcaagtttctgatcatttagaagccatccgattatcaaaaaagaatgttttattaacgttcctgaacattcaaactcacctctccaaagagtaaaaaaaaattatttcgcagatgcagcagcaaaaagactctcttgacaccaatatcacatgaaactataaaagtcactacattcaaaataagtgccattgaacaggaactccaagggattcaaaaagaggcttcagataagaaaaagtagatatggctaacaaagcggtaatgcttttcccccatttacaaattttggtgtggacccaacaggagacccatcttgcctttgagatttcaatttcttatggtacaacatgtttatgagccaactcacgggaaatctgagaaaatgattgtttggggaaagaaatactactggaaaccctcacctccattactgaataaagtttacactaaatatccaatttaatttatacaaagcataatccaagaaagcttttttttttttttttttttgaaacggagcctcactctgtcctctgtcaccccggctggagtgcagtggcgcgatcttggctcactgcagcctccgcctcctgggttcaagtgattctcctgcctcagcctcctgagtagctgggattacaggcatgcgccaccacacccagctaatttttctattttcagtagagacggggtttcactatgttggtgaggctggtctcgaattcctgacctcgtgatccgcccacctctgcctcccaaagtcctgggattacaggcatgagccaccgcacccggccaacttttttgtttgtttgtttgtttgtttgtttgagacggagtctcgctctgtcccccagcctggagtgcagtggcgtgatctcggctcactgcaacctccgcctcccgggttcaagccattctcctgcctcaggctccggagtagctgggactacaggcgcctgccaccacgcccagctaatttttttgtatttttagtagagacggggtttcatcatattagccaggatggtctcgatctcctgacctcgtgatccgcccgcctcggcctcccaaagtgctgggattacaggtgtgagccaccgcgcccagccaactttttttttaagtatagaaaattttacaggttgggcgcggtggcaggcgcctataatcccagctgctcggggggctgagacaggaaaatcacttgaacttggccaagaggcggaggttgcagtgagccgagatcgcagcaatgcactccagcctgggtgacagagcgagactccatctcaaaaaaaaaaaaaaaaaaagaggtggagatttcccagaactgaggttccctcccctttttagactatatagggtaacttccaaacattgccagggcattggtatactgtcatggcgctggcgggagttagtatgctaatgcattataattagcgtataatgagcagtgaggatgaccacaggtcactttcatcaccatcttggttttggtgcgttttagccagcttctttactgcatcctgttttatcagcagggtctttgtgacctgcatcttgtgccaacctcctatctcatcctgtgactaagaatgcctaacctgggaatgcagccgagtatttctcagccttactttatccagcccattttcaagatggagtcactctgattccaatgccactgacaatgataagcacttgccagcaaagaggtgaacgcatggatttaaggcacttgaaatatctcagtgtaaaagcaccctgtgcatgtagcaggacgagccgcagacaaaacctctcagacaccgagttgcagaaggaagggctttattcagctgggagcattggccagctactgtctcaaaatctgagctcccggagtgcacaatttctgtcccttttaagggctcacaacactaaagatttcacatgaaagggtcgtgattgatttgagcaagcaaggggtatgtgacaggggctgcatgcaccggtggtcagggaggaacagaacagggcagggagtttcacaatgttcttctatacaatctaaggaatctatgaataacatcggcttctaaatcataagttgatttttaactactgggtttaggccaggcgggcctaggcctggtttcgggcctggcgcggggttgcctgtctttggttttacttccttgttgtttttactgaatataaaacaatgtgagagggtctctctcttctctcatgcatacatactccatgtttgaacaccgcagccattgtcctgtaacataatagcatttgtctcattagctttttgatgttgatatcagatttctagaggaatctgtaggttaaagatataaataaaagtgttgctaatgggctgagaacggtggttcacgcctgtaatcctagcacttcggtagaccattgcaggcagatcacttgaggccagaagttcgagaccagcctggccaaaatgaggaaaccccgtctctactaaaaatacaaaaattagcagggtatggtggcacacgcctgtaatcccagctactcggatggttgaggcacgagaatcgcttgaacccgggaggcataggctgcagtgagccaagatcacaccactgcaccccagcctgagtgacagagagaactatgtcttaaaaaaaagacaaaaaaaaaaaaaaaaggaagaagccgagcatcacaaattctgaaataagaagtctccaaacacgcgggcaatcagttgcacacagtacccccagaaatgtgcgtatggcctcttctaagatgggagaccctcctccgcatctggacctggagtcgccatttcctagcgcccctcgcagtggagcttgcccctttcttcggaaagtcggaagaaagccaccttaagcgctgcccatgtctgggaactacattacccagaatccgccctgcgaaatggtaacgtggctgagccaatgaagcttcagagaagccgtgccattgccggggcacgtaaagtcaagccaggacttccggcgtcctagccgtggcagccattttggcctgtcaggtccatccggcgatgctgggtctggacgagctcgggaggagtggttgtggccattgcacacaggcggatctgaggttcggcgacgccgctggtcgcgacccgggacaggacaacgacaggaacaccgccgagcccgcgttccccccccgcccagagtcatggcggcagcagccgctctgagggcgcctgctcaggtgagcgctgcgacctccgggccttacccaccctacccacccagaccctgaggcccctgatcgtgagggccgcctcctcgcgtccctgcagcccaggcctctgtcagggacggagaggcgccggcgggtgggatccctgtttccgacacccagttgatgcggtcggcagagcgagactggcggagggcaaaggcctgcaggcgcgactgaggcaggaggatgcggaacacggggacatcgtgtgtctactgggaaagaagtgtgatacggagttatttctttttttttttttttttgagacggagtctcactctgtcgcccaggctggagtgcagtggcgcgatctcggctcactgcaagctccacctccccggttcaagcgattctcctgcctcagcctcccgagtagctgggattacaggcatgcgccaccacggggtttcaccatgttggctaggctggcctcgaactcctgaccttaggtgatccgcccacctcggcctcccaaagtgctgggaatacaggcgtgagccaccgcgcctggccgaggcggagttgtttcttcagtaccaggctgagggttgaactttgactgtgaggacgctaaaagccatggacagttttgaacaaaggaggaaatctgtgttagagttgcgattcccaaaagatgttcgaaggaagaacagagttgaaggcagtgatgaggacattgagaggttgaatcattgagaggtgacattgagcactgggccacaagattagagactcagtctgaagtcatctggctgcagggccaaaaaaagcttacagagaagcctgagtctatcaaatccgagcacagacacatttgtgaaagccctgccttttggcacacctcatggctacagaagcacttacagaatccacagtaggaagtaggggatgctctagtccttcactggtcctcatcctatcccacatgtctagatcttggcatcttttttttttttcggcgacgggttctcactcaacacccaggctgggttgcggtgacgcgatcacggcgcagcacggcctcgacctctccgggctcaggagagcctctcatctcagtctcccgagtaactggctttttgtatttttagtagaggtggggtttcacggccgggcgcggtggctcacgcctgtaatcctagcactttgggaggccgaggcgggcggatcacgaggtcaggagtttgagaccatcctggctaacacggtgaaatcccccctctactaaaaatacaaaaaattagccaggcctggtggcacacacctgtagtcccaactacttgggaggctgaggcaggagaatcgcttgaacccgggaggcagaggttgcagtgagccgagatcgcgccactgcactccagcctgggcgacagagaaagactccgtctgaaaaaaaaaaaaaaaagagagagagagagatggggtttcgccatgttgcccaggctagtctcgaacccttgggctcaagcagtcctcttgcttcggcttcccaaagtgctgggatgccaagcaggaactaccgcacctcctaggacacttaagtgccatttctccggtccttcaatctggggatcttggaaaaacctcaaaccccaaacctacatcagtgacataggttatggggagttgttgctatgtctgtcaactaatgtaacacatgtggagggttcacccaggaactgatactggggtgtgcaaatacttacttagaagtgaaactagaggggtgaggtgatgttaccaatttcttaataggcgctgtctggttactgagtgggcaacagactgtggggttgagggaggaggaagatcaaactggaagctactgccctagtcgaggtgaggattaatggactagagttgtggcttaggcaatgtggctagatctggatttgtgttttttagaggggcaagtcaattttttttttcccaagatggagtctggacctgttgcccaggctggagtgcaatagtggaatcttggctcactgcaacctccgcctcctgagttcaagcgattctcctgcctcagcctccgaagtagctgggattacaggcgcgcgcctccacacccagctaatttttgtatttttagtagagactaggtttcgccatattatccaggctgcctcgaactcctgacctcgtgatccacccgccttggcctcccaaagtgctgggattacaggcttgagccaccgtgcccagcctggcaactcaatttttaaatgtgaacagtgagagcttgagaggattcaggaaacacccctgggttttttatcttagcagctgtagcaatgggagctgcatcaactgagatgagcaagttgatagcaggtgtaatattcactgaggctatcaggaggtttgttttggccattctgcgtggaaaaaaatacaaattgcttttgctctgctctcccccacaacaatcaacacagagtacttctgtgactagataatgtgtggatggttttcctcatacaccaagtagttctgcagtggacatcagatcccacagggtgaagtctcagtcccacgggactgtccgccaacccctttcgatgccaatcacaagccccaggatgtttttttttttttacctgtcctttgactgacttgataaaaatcaggttcccatgaccccttcctcggcttccattaaattgctagagccagtcacagaacctcaggagatgctttaatttgccagtttattttaaagagtatttattacaaaggttacagatgaagagatgcataaggggaagcgacccagagcttttatgatcttcaggcacaccaccatccaggaacttccatgtgtttggctatttggaagctccccagaccctgtctttatggggttttatggaggctttattacataggcatgattaattaaatcattggtcaatgctgatcagcttaacttttggccccctctcccctttctggagattggggtatggggctgaaatttccagacctcgaatcctgacatagtctcttttccctgaccggtctccattctgaagttatctaggggtttccaaccatcagtcaactcattgccattcaaagtcacttataaatttgagaatttcatgaattttaggagttgcatgccagaaaaggagatgaccaaatatatatttcacaatatcacacccatattaagattctgaaatgtattagatactacttagtggagctattaaatgggcagctggacacatagatgcaaatatctggggaagcgttgatattggaggtatctaatatatggtaactactgtgtggactgaaatgattgagtcatggctcacatttggaaggcacaaccttcagattatgttgatgacactgttggacaggaagtagagtttgggtttcctgcttgtgtacctggtgatggtattggatttgagaaacacaggtaagggaggtaaatggccatgaagggaggatacatctgtttcttcttcttctttttttttttttttttttgagacagagttttgctttgtcgcccagactagagtgccgtggtgcaatctcggctcactgcaacctccgcctcctgggttcaagtgattcttctgcctcagcctcccgagtagctgggattataggtgcctgccaccatgcctggctaatttttgtatttttagtacagacagggtttcaccatcttggctaggctggaaagggaggatacatctgacagactagtttggcaagtgacataatgcttccaagaaatgaatagacttgagatgcatgctgacgcataggagtagctgagggaagatgacactcaggctggagcttgtgtttattggccactttgtggcctcaccaagattttgagatgactttagtgtggcctggggtgtttgattcagcctggtggatgtggaggcaaatatggtcaccttgtgagagtcactatgcatgagattgatgaccagtggttctgggctttgaatggggttaggtggacagaagaaagtcatagttgccgggcatagtggctcacacctgtgatcccagcactgtgggaggccaaggtgggcagatcacgtgaggccgggggttcgagatcagcgtcgccaacatgatgaaagcccatctctactaaaaatacaaaaaaagtagctgacgtggtggcaggcacctgtaatcccagatattcgggggctgagacaggagaatcgcttgaacctgggaggcagaggttgcagtgaaccgagattgtgtcattgcactctagcctgggtgacaagagtgaaactccgtctcaaaaaaaaaaaaaaaaaaaaagtcagccgggcgcggtggctcacacctgtaatcccagcactttcggaggctgaggtgggcggatcacttgaggtcgggagttggagaccagcctgaccaacatggagaaaccccgtctctactaaaaaatataaaattagccaggcgtggtggctaatgcctctaatcccagctactcgggaggctgaggcaggagaatcacttgaacctgggaggtggaggttgcggtgagctgagatcgcgccattgcactccagcctgggcaacaagagtgaaactccatctcaaaaatataaataaataaataaataaataaataaataaataaataaataaaaagtcatagtttctgaggatagcaaatgcagcacagaagtggaatagaaccataaatatctgaaaatgctagtggttctttttgtctgtggatttatgcatggagggcgtcagaatgatttggggctaccattgctattgagaaacattggaattctgtggtaattttggattcctttttaatttaccaagactactgtggatgatgtcagccacattatggtgtaagccctaaagttaaggtcagtatcatgtgctaccttcatgtctggtgataccagtactacctcacatggtctgagtgcaaatctccctccccactctgctctttgggataatgtgtcctagcttaactacccttttaatcaagaggactagacagagttcctggttattatttatttgtagcaggtttcagtttctttttttcttttttttttttttgagacggagtctcgctctgtcgcccaggctggagtacagtggcagatctcatctcactgcaagctccgcctcctgggttcatgattctcccgcctcagcctcctgagtacctgggactacaggcacccgccaccacacccggctaatttttgtatttttagtagagacggggtttcacaatgttagccaggatggtctcgatctcctgacctcgtgatctgcccacctcggcctcccaaagtgcagggattataggcgtgggcgtgagccaccgcacccaatgcaggtttcaatttcatttctacccacagagttactcaagccagttgcagctgggtgtggtatcgcacacctgtggtcccagctactcaggaggctgagatgggaggattgctggaacccaggaagttcaggctgcagtgagctgtgattgtgccactatgctccagcaggagtgacagaacaagaccctgtctcaaaaattaaaaataaaaacaagccagttgcattcttttatgggaatcagggactatcacaccctcttgattgagcaaagcttacataccacaatccctggttgctcttttttttttttttttttttgagacagggtcttgctccgttgcccaggctagagtgcagtggtgccatctaggctcactgcaacctccatctcctgggttcaaatgattctcctgtctcaggctcctgagtagctgggactacaggtgcatgccaccatacccagccaatttttgtattttagtagagacggggtttcaccttgttggtcaggctggtctcgaactcctgacctcaggtgatccacccgcctcggcgtcccaaattactgggattacaggcgtgcgccaccgcgcccggccactctctcttatgcatagtgcaacccccatgtggctctctgtggtgagtggtgtcctcttctctcaagcgctgagcatatttgattaatgaactttcgtgatgacttgtgttcagcgtcaggtgttgtgtttggccatcatcataaccctagggtgaaactcctactctttaccagtagaagaaagggggattaaaatactgtaacttctggcaagaccagagagaggcctatagtgtgggcagttaggtggtggtggcaattggcatgtgtctgtggtgtccaaagatgggaaggatgtgtacgtacataaggattatgtttgaaaggcctcaggcactgcactgggattcatgtgacctttgctgtaccaggggaattgctagaaaggagaggatggaaccctttatttcaggaccacagcatagatacctgtgtgcttatctgcctcttgttgctgacggctatgtgtcatgattaatggtcccatgaggacacagtggcactagtgggcaaaatttctcctctgagttggggatcctgggaggaggaggatgggcaagggtagatatgttggggaagtggactgtgggtcttcagcataggggccatttgtggtttcatctatccccatcataacagagcagtgtgacctttgaagatgtggctgtaaacttttccctggaggaatggagtcttcttaatgaggctcagagatgcctgtaccgtgacgtgatgctggagaccttgacacttatatcctccctgggtaaggtactcatattcacctgtgacctgagttagtctgtgcccctcacctttatgccttatctctttctcacaccaggaccatggacacagcttcattctccagttctctggagaggttctgttgttggtcggactgaggtgtacgtactgccctgtcctttccttgagcagccccaacctgctttgttgcaggcttccagggaaggagtcagggtcaggagtcttaaagtcaccctaatgcctcccaccttggttgtcctctgcctgtctgggtgactgtgcagatccaaggcttctgtttgtctcaagttccgtttccctcctttagttcacatttgttcatgctacgaattgtcgtcactgatgtggtcattatgtacatgaaccacagcctattcttgcaataccctacttcaaaattctttttgtagtatttcatcaggcacaataacacctgtcatcccagctcttcagaggctactcggagcccaggagtttgaggccagcctggccaacatagcaggtcctcatctctaaaaatatataggaaggaattctttttgtaatatttagtttcttttcctgtggaatatcaaatgcagagttgttctgagccagcattggctgttcgtctgtcctatttttcccttagtacttacattatcgagtttccatgtagttgctcatcttggtggtgaaatgaagagcccgtggttgtccctaagatgtaaatgagtccagccttagcaaggacttggggcagcttggttctgaagaatagcatgtgagtaaggtcatgacatcagggctctattcaaattatgccatagacctcttctatttgactagtattttcatgccaatagaagtagccccactttatgtctttccttccccattcttgagagtgccagtttattagtcctacaccttgttgcttctgctgttacatccagcccaggactaattttcatatatctggactccacgtctcacctatttttctcacggctctgtctgcagtggtcttcaatattggctcatgtattttgtattacgaagtatatacccattcttttttttttttttttttttttttttgagatggagtttcgctcttgtttcccaggttggagtgcaatagtgcgatctcggctcactgcaacctccgcctcccaggttcaagtgattctctggcctcagcctcctgagtagctaggattacaggggcccaccaccacgcccggctaatttttggggtatttttagtaaagatagggttttaccatgctggcaaggctggtcttgaactgacctcaggtgatccacgcccctcaacttcccaaagtgctgggattacaggtgtgagccaccgcgcccagcctctatggagtatataatcttttttttttttttttcttgagacagtttgctctgttgcccacgctggagtgcagtggcacagtctaggctcactgcaacctccgcctcccaggttcaagcaagtctcctgcctcagcctcccgagtatctggtattacaggtgcatgccaccacacctggctaacttttatttttagtagagatggggttttgccatgttggttgttgaccaggctggtctcaaacccctgaccttgtgatccacccacctcggcctcgcaaagtgctgggattagaggcatgagccacggttctcggccacgtatatacctattcttaacagtccctgaccaaaggatgttgtgctctagtcatgttggggggggcctggacatatttatatagtactcacacgtcatcagcaaataaggttccacaggcaagttgtttgcaaatgaaggagttatagaccctgcctttattctgtctgttgactcatttagtcatgcccttgacaatatgaggccttctatatctgtgataatgctaagcagccccaacctcaacctgaacccaactccctgtttgtgcaaataattccatagactagttttttggtttgtcagatactcttgtgggtaggctgcatactcaacaaagtcaacatgtacctcaccagcatttctttgcttttaggttgttggcatggaggggaagatgaggcagcaccttctaagcagagcacgtgtatacatatatacaaagaccagggaggtcatagtggagaaaggccttatgagtgtggggaatataggaaattatttaagaacaagtcctgcctcactgaacccagaagagatcacaaacacaggaatgttcgcactggagaaaggccttatgagtgcagcaaatatgggaaattatttcaccaaaagcctacactccatattcatgagagatttcatactgggcaaaagacctatgagtgcagtgagtgtggaaaatcatttcaccaaagctcttcactcttgcagcgtcagacacttcacactagagaaaggccttatgagtgtattgaatgtgggaaagcctttgctgaaaagtccagtctcattaaccacaggaaagttcactctggagcaaagcgttatgaatgcaatgaatgtgggaagtcctttgcttatacatctagtctcattaaacacaggaggattcacactggagagaggccttatgagtgcagtgaatgtgggagatcctttgctgaaaactccagtcttattaaacacttgagagttcacacaggagaaaggccttatgaatgcgttgagtgtggaaaatcatttcgccgaagctcttcactcttgcagcatcagagagttcacactagagaaaggccttatgaatgtagtgaatgtgggaaatcctttagcttaaggtccaacctcattcaccatcagcgagttcatactggagaaaggcatgagtgcgggcagtgtgggaaatcctttagccgaaaatctagccttattatacatctgagagttcacactggagaaaggccttatgagtgcagtgactgtgggaaatcctttgctgaaaactccagccttattaaacacttgagagttcacactggagaaaggccatatgaatgcattgattgtggaaaatcatttcgccacagttcttcgttccgtcgccatcagagagttcatactggaatgaggccttataagtgaagcaaattttggaaattctcttgcccaggctttttgctccttcaaggccagagagttcacaccagatcaaggtgttatgagtgtgacaaatggggaatattctttagctagaatgctagcttctttacataaaagagtgctcccactgaagaagtgccttttgagtgcaatgaatgtgagaaagccttcagccctctctcattggttaccacaatatttacatgaggaaaataccacagatgtggaggtaatattattttttcttcaatataacactggaggaaaccccttatgaggatgccatctgcctaaattgaatgtcatacatcaaatagctgcatacattccaggtatgtgggaactgcatagtatttttcgacctgcccaggtctcttgctagacttctgtgacttacagttctcttctaaaaagcatttcacctttaccacttggcaggtgcccacagtacatcattcgcctaactcatcatgatccagaagtaactttgattttgtttcattcaacagagggattttttagtatcctcagcactcattctattctcatttctttctctccaatgagttaggccatgaacctgactcatttttggcacagaggactcttctgataacttgaaaaaatggactacctttttcagggatcttttggatctcacagagttcttaagatggaattttccagcctgccagtcatgaatctcagacagcctgccacctattgccctgatttgtgttataataaaggccttgttgcttaagacaccttcagtctttgcaggagggcatggaagctccaagtgcttttctcatactttaccctatgcatctctttatctgcatcttttgtactatttataattaaccagtaagttattttccctgagttttatgtgccattctatcaaattagtcaaatccagttgtggggtccacgggatttgtggtttatagctcatcagtcaaaagcagaggctctggggctttgattgtcatcagaaatgggagcctcagtcttggtgactgagtcctcaaactgggggatgtgatgctatctgcaggtagataatgactgagttgaactggaggacccccagcttgtgtccacgggaggattgcttggtgtgtgtggaaaacaccctgcacatctggtcacagaattattccatattgattgttgttgtgttgtgtgacagacaatagaggaaaagtttatttttttctacacatacgctatggcttcccttctattattccatatctttcaactcctgccatactatttctttctctccaagtttttgttcttcctcagagttcccataaatggaaaggatacgcacttcattgaaataagaatttcatgttagccaagttttcaggatagccatgagtttcacttaattatctgagaacttagagcttactgtcctctacttactatccactgagacttaatgtgttcttggccatcacagaaactttactagctacttatgccattgtcaatggataactctctgaatccacattaataactttgtaattagcttagtcctcagctgtttttcagagataatccccagtcttcatgcagacactatcactgcacctacaggtgaaatgataatcacttcctagcaaggaggttggatcatggaatacaagataatttctcaggaatcagatggtcttattccacacctgcaggaatgtcagcattgcaaccaccatggcaaatattgatttaataaacaattactattcccagataagtgtcaaaatcttagaagaaattgtcatatcttagacaatttagaagtgatggagggtggatgatgagaaattatcgcaccactgcactccagcctgggcgacagagcaagactctgtctcaaaaaaaaaaaaaaaaaaaaagctttactcacataaagtgaagaacaagaagacttttttgagtagatgtttagtgtccttataacattttttgtatatgcatttttatccttttgggaacatgatttacaaatgcgagctgcagggctattgcattaacgtgttgaatgcaagagttaaaacttcctgtcccatttagtgaatggaaaaatacttaagttacatgaataaaaattgtaaattacaaatagcaagatagttaaggatgtaaaacatgtcaatccctaaatgttacttaatgacatcatgttttataggtacattttattttcagttactagtattttattcccttgctggaaagatgtccagtgattctgaatcaatacaggtgtgtgggatgtcatctagaagtcataaaatggcttattcagattaaccatgttatgaccactcacactcgctgatacatatcttcctgtcacttccgtggagagtgaaattttctcttttattttttattctttgagacagagtttcactcttgttgcccaggctggggtgcaatggcgtgatctcagctcactgcaacctccacctcccaggttcaagtcattctcctgtctcagcctctagagtagctgggattacaggtgcccaccaccatgcccggataatttttgtatctttagtagagacggggttttgctatgttggccaggctggtctcaaactcctgacgtcagatgatccgcctgcctcagcctcctaaagtgctgggagtacaagcgtgcgccaccacgcccaaccaaaattttcttgataacaccctaattatattcccacaaaacctttgtagtcagagaaaatctgtagtttataaagacaaagtttttagtaatgagagcacttttaggatctgtaggctcttgtctgtataattaatacaacatttcttttttttttttttttttttttttttgagacaaagttttgctcttgttgcccaggctggagcgcagtggcacgatcttggctccctgcaacctccgcctcctgggttcaagcgattctcctgcctcggcctcccgagtagctgggattacagttgtccaccaccacacccagctaattttttgtatatttagtagagacgaggtttcaccatgttgaccaggctggtcttgaacttctgacctcaggtgatccacccgccccagcctcccaaagtgctgggattactggcgtgagccaccgtgcccggcctgttctgcttatatatgactaaaatttatgtgaaaatttctgtataaggccaggcttggtggctcacgcctgtaatcccagcactttgggaggccaaggtgggtggatcacctgaggtcaggagttcgagaacagcctgacccacatggagaaaccccatctgtactaaaaatacaaaattagctgggcttggtggcgcatgcctataatcccagctacttgggaaggctgaggcaggagaatcgcttgaacctgggaggtggagtttgcggtgagccgagatcacgctgttgcactccagcctgggcaacaagagcaaaattccgtctcaaaaaaagaaaaagaaaatttctgtacaaaatatttagatttccttcctattctcaatatattagtgtgctttatcattctaactttttggtattttgattatgctagtaatttcttagttttgttcaattttaatgtgatatataaatcaatatattccctgataaatttttacataatttatgtaaatttgttgttgttggccgggcatggtggttcacacctgtaatcccagcactttgggaggctgaggcagacagatcatctgaagtcaggagtttgagaccagcctggccaacatggcgaaccgtctctactaaaaataaaaaattagccgggtgtggtggcatgcacctgcagtcccagctactcgggaggctgaggcaggagaattgcttgaacctgggaggtggaggttgcagtgagccaagatggctccactgcactccagcctgggtgatagagtgaaactccgtctcaaaaaaataaataaataaataaatttgttgtagtatattttctccttgaattacttactctaaaacaagtaactttactaacctctacttggtctacctggttaattaattctttcttttttttttttcttttttttttttttgagacggagtctcactgtggcccaggctgaagtgcagtggcacaatctcagctcactgcaacctctgcctcccaggttcaggtgattctcctacttcagcctcccgagtagctgggattacaggtgcctgccaccacgcctggctaatttttctatttttcgtagagatgaggtttcaccattgttggccaggctggtcttgaactcctgacctcaggtgatccagccgcctcggcctcccaaagtactgggattacaggcgtgagctaccatgcccagcctaattaattatttttcaaatatctttaaactgatccaattcatgatcctaaaatgcacagtggcaaatgctgttagagtacattattctacatactgaatcttctgtttccatagttaagtttctggtttattaggagacatttttttttctttccagaattttaatgcaagttttactttttcaaattaataaaatgttagcaacagagaataacttgggaaaacaagtagcatttttatttcaatcattcttcatttgaatgcactaggaagctggagaattttagactcttaagaaatttactttaaagccaggcaccatggctctgtagtcccagcttctcagaaggctgaaacaggaggattacatgagctcgagtttgagtaaggcctgggcgacatagtctctttaaaaaaattcagttcatgcgggtgcggtggctcacgcctgtaatcccagcactttgggaggctgaggcaggcgggttgcctgagctcaggagttcgagaccaccctgggcaagacggtgaaaccctgtctctactaaaatacagaaaattagccggacgagccggcatgtgcctgtagacccagctactcaggaggctgaggcaggagacttgcttgaacccgggaggcggaggttgcagtgagccgagatgtgctactgcactccagcctgggcgacagagtgagactcatctcaaataaataagataataaaatccagttcagtaaaatgtgcctgataaaatataagtgactactggcctggagcagtggctcacgcctgtaatcctagcactttgagaggccaaggcaggtggatcacctgaggtccggagtttgagaccagccgagtcaacatggtgaaaccctgtctttactaaaaaatacaaaaattaactgggtgtggtggcacattcctgtaatcctggctacttgggaggctgaggcaggagaattgcttgaaccctccgggcggaggttgcagtgagctgagatcacaccactgcactccagcctgggcgacagggcaagacaccgtctcaacaaaacatatatataagtaatgaatgaatattatgtcaatattctaagtcagaatgttactgtaatactttttaattctcattccatttaaaataactggttaattttcaaatcataatgaaatttttacaaatttatgtgtagtacaaagcatgcatatacattcatatgtattatatgtatatatagcctttaaaaatatttatgagctttatgccgggcgcggtggctcacgcctgtaatcctagcactttgggaggcggaggcgggcggatcacgaggtcaggagatcaagatcatccgggctaacacagtgaaaccccgtctctactaaaaatacaaaaaaattagccgggcatggtgggcacctgtagtcccagctactcgggaggctgaggcaggagaatggcgtgaacccgggaggcgaagcttgcagtgagccgagatcgcgccactgcactccagcctgggctacagagccagactccgttctaaaaaaaaaaaaaaaaaaaaaaaaaaaaaaatatatatatatatatatatatatatatatatatatatacacacacacacacacacactagctttagcttccagtagatgcaatttatgtctttatgaccctatgtaatgaaatgtccattttgattcgtggctcttgatggcatctcaaatgatgtcttagatctgcgaagaagctcagcatcacaaattctgaaataagtctccaaacacacgggtaatcggttgcacacagtacccgcagaaatgcgcgtatggcctcttctaagatgggggagcctcctctgcaactggacctggagttgccatttcctaacgcccgtcgcggtggagcttagccccttcttccgaaagtcaggttggaggcggcctttaagcgccgcgcgtctctcggaacttaaatattacccggaatcgtctctgtgaattggaaagcccattgaagcctcagagaagccgcgccattgcggaggcacgtaacgtcaagcagggacttcctgcgtcctcgccgcggtggccattttggcttgtcgggaccatccacctatgctgcgtctgtacctctttgtcaggaccgagagcgcgcgagaggagtggttgtgcccattgcacacaggcggatctgaggcttggcgacgccgctggtcgcgacctgggacaggacgagcacaggaaccgcctggcctgcgtccccgcccgcgcatgaagtcgtggcggcggccgctcaagtgagccctgcgacctccaggcctcacccgccatccccacacagaccctgagacccctgactgtgaggggcgcttcctcgcgtccttgcagctcaggcctctgtcagggacctagaggcgccggcgggtggaatccctgtttccgacaccggttgatgcggtcgggagagcgagactggccgagggaccggcttaggcaaaggcctggaggcacgactgcgccaggaggattcggaacacagggacatcttgtgtccactgagaacaaagtatgagtcggagttatttcctcagtaccaggctgaggattgatctttgtgaggaccgtagaagccatggacagttttgaacaaaggaggaaatctgtgttagagttaaagattccgaaaagatgttcaaaggaagaacggagtgtaaggcggtgatgaggacagtgaggcattgagaggttgaatatttgctcaaggtcacgtagctggtaagaggtgacattgagcactgggccacaagattagagactcagcctgaggtcacctggctacagggccaaaaaaagcttacagagaaacctgagtctatcaaatcccagcagggacacattcctgaaagctccgccttttggcacaccttctcatggctatggaagtatttaaggaacccacagaaggaagtataggatgctctagtccctcactggtcctcatcctcacctatatgtctagatcttaatgtcctgggaatttatttatttagcgacagagtgtcactcttggtacccaggttggagtgcagtgacgcgatcatggctcagcatagtcttgacctccccaggctcaggtgatcctcccatctcagtctcccgagaaactggctaatgtttgtgtttttaatagagacggggttttgccatgttgcctaagatggtcgaaaactcctgggctcaagcaatcctcccgccttggcctcctaaagtgctgggattacaggcgtgagccgctggtctggccaggcctcctaggactcttaagtgcaatttctcctgtccttcgatctggggatcttgcaaaatcctcaaaccccaaacctaagtcactgacacaggctatggagaagtgttttcatgtctgtcgaccggtgggaaacacatgtggtggattaacccaggaatgatactgggatgtggaaatggcttagaagtgaaactggagaggccgggcgtggtggctctcgcctgtaatcccagcactttgggaggtcaaggcgggtggatcgcttgaggtcaggagatctagaccagtctggccaacatggtaaaacccagtctctactaaaaatacaaaaatcagctgggcatggtggcgggtgcctggaatctcagctactcgcaggctgaggtgtaagactcccttgaacctgggagatggaggctgcaatgagccaagattgtgccaatctgcactcgagcctgagcaacaaagtgagaatccatcgcgaaaaaaaaaagaaagtgaaactggagggggttaaatgatgttaccagtgttttaacaggttctgtctggttacagagtggacaacagactgtggggttgagggaggaggaagatcaaactggaagctactgccctagtccagatgctcaaatcctgacagtcttttccctgaccagtctccatcctgaagttatctaggggttaccaaccatcattcaactcattaccattcaaagtcacttataaatttgagagtttcatgaattttaggagttccatgccaggaaaggagatgaccaaatatatatttcacaataccacagccatgttaagattctgaaatgtaatagataatacttagtggagctatcaaatgggcacctaaacccatggatgcaaatatctggggaagggttaatattggagctatccaatatatggtagccactgtgtggagcaagatgagtgagtcatggatcacatttggaaggggcaaccttcagattatggtggtgacactactaggaagacaggaagtggaggttgggttgcctgcttgtgtacctggtgatggtattgtacttcagaaaacaggtgagggaggtaaatggccatgaagggagaatatatctggtagcctagtttggcaggtgacataggcttccaaggaatgaatagacatgagatgcaagcagaagcataggagtagctgagggaagatgacactcagcctggaccttgtgctaattcgccactctgtggccacaccacgatattgagatgacttttgtggggcctggggtgtttcattcagcctggtggatatggaggcaaataaggtcaccttgtgagagtcactaggcccgagattgacggccaatgggtctaggctttgaatggagttaggtggacagaagaaagtcataatttctgaagataacaaatgcagcacagaagtggaatagggccatgaatacctgaaaacactaacgttcttttttcctgtggatttatgcatggagggcttcgtataatgacttggtactaccactgctattaggaaccattggaattctgtgataattttggattgctttttaattcaccaagactactgtggatgatgtcagccacattatggtgtgagccctaaatttaaggtcaatatcatgtgctaccttcatatctggtgatactagtattacctcaaatggtctgagtacaaatcccccttcccactctgctcttttgtataatgtgtcctagcctaactacccttttaatcaagaggactaagcagagttcctgtttattatttatttgtagcaagtttgaatttcatttctacacacagagttaattcaaacaagccagttacagctgggtgtggtgtcgcacacctatggtcccagccactcgggaggctgaggtaggaggatccctgaaacctggaaagttcaggctgcagtgagctgtaattgcaccactacgctccagcaggagtgacagagcgagaccctgtctcaaaaattaaaaacaagccagttgcatcctttcaagggaatcaggggctatcacaccttcttgattcagaaaagcttacataccacagtccctggttgctctctcttatgcatagtgcaacccccatgtggctatctgtggtgagtggtgtcctcttctctcaagttgtgagcatatttgattaattaactttcttgatgacttatgttcagcatcaggtgttgtgtgtttggccatcactataaccctagggtaagactcctacccttatcagtagaagaaagggggaataaaatactttaacttctggcaaggccagagagaggtctatggtgtgggggagttaggtgttggtggcaattgacatgtgtctttggtgtccaaagatgggaaggatgtataggtacacagggattatgtttgaaggttcttaggcactgcattgggattcatgtgacctttgctataccaggggaattgctagaaaggaggggatggaaccccttatttcaggatcacagcatagatatctatttgtttatctgcctcttgttgctgatggctatgtgtcatgatcagtggtcccatgaggacacagtggcactagtgggcaaagtttctcctctgagttggggatcctgggagaaggaggatgggcaagggtagatatgttggggaagtggattgtgggtcttcagcacaggggccatttatggtttcatctatccccatcataacagagcagtgtgacctttgaagacgtggctgtaaacttttccctggaggaatggagtcttcttaatgaggctcagggatgcctgtaccatgatgtgatgctggagaccttgacacttatatcctccctgggtaaggtactcatacttaactgtgacctgagttagtctctgcccctcccctttattcctcttggtaataacgtctttctcacatcaggactgtggcacagcttcattctccaattctctggatcagttctgtggttggtagtactgagatacatgtactgccctctcctttccttgagcagccccagtctgctttgttgcaggctcccagggaaagagttagggtcaggagtcttaaagtcaccctaatgcatcccaccttggttgtcttctgcctttctgggtgactgtgcagatctaagacttctttttttgagacggagtctcgctctgtcgcccaggctggagtgcagtggcgcagtctcggctcactgcaagctctgcctcccgggttcatgccattctcctgcctcagcctcccgagtagctgggactacaggcgcccgccaccacgcccggctaattttttgtatttttagtagagacgggatttcaccgtgttcaccaggatggtctcgatctcctgacctcgtgatccgcccgcctcggcctcccaaagtgctgggattacaggcatgagccgccgcgccccgcccccattgcatttttcagcctgcctgtgtcccttgccagacttatgtgactgccagttatcttgcaaaaagcatttcacctttaccacttggcaggtactcacagtttcatcactcccctacctcattatgatccagacgtaactttttctttcattcaccagggggattttttagtatcctcagtactcattccattctcaattctttgtgtctgatgaggtaggccaaggacctgactaatttttggtgcagagaactcttctggtgatttgaaaagatggactacctttttcagggatctcttggatctcacaggattctttttttttttttttaagatggagtcccgctctgtcacccatactggagtgcagtggcgcaatctcggctcactgcaagctccacctcccgggttcacaccattctcctgcctcagcctcccaagtagctgggactacaggtgcccgccaccacgcccggctaattttttttttttttttttttttgtattttcagtagagatggggtttcactgtgttagccaggatggtctcgatctcctgacctcgtgatccacctgcctcagcctcccaaaatgctgggattataggcgtgagccaccgtgcccggccctcacagcattcttaagatagaattttccagcctgccagtcacaaatcagacagcctgcctgccgcctatttcccttgtttgtattataataaagactctgctgcttaagacaccttcaatcttgagagctgtatttacagtgtggaattgtttgaacactggatttgcagatgggcatggtggctcatgcctgtgataccagcactttgggaggccgaggcagaagggtcagttgaggtcaggagttccagaccagcctggccaacatgctgaaaccccatctctactaaaaatacaaaattagccaggcatcgtggcattcgcctataatcccagctacttgggaggctgaggcacaagaatcactttaacctgggaggtggaggctgcagtgagctcaggtaatgccaccccataccaggatgagcaacaagagcgaaactatctcaaaaataccataattttggggttcataggtcaacctgaaagggtggcagttttcatcacaatctctggtgcttctgagagcaacatgaaattgttctctacttcacaagggatggtgcattatgtttcagtgctgttgagggtaccttcacaggttgtgaggttatagtggaaatgataagtttttcggaattactgcattttaaaagggcttctactatgatccagacatggctgtgaaggatgaatacaaacagaaattctcaggaccttcttaattgaatcttatgtggctaaggtcactgctggagagaataacctaaagattttgttatttgtggtagtccttctagtctaattgacctaaaggtcattcctgcataggcaggaggaagaagaaagggagcagggatgtccattagaccactacgtggcccatcatgtgaccagccgtcattctttctgaatcatctggaaatggtctttattgttcgtcatgtttttgttaccatgaaggctagttgcctcactcaggttgaggagatgatacagcaatagttaataaacctcttggaaaaatcaagtccagatttttaaaattacatttttaaagctgtaataagaaataaatcacttttttttttctttgagatggagtctcgctcttgttgcccaggctggaattcagtggcacgatcttgggtcactgcaacctctgcctcccaggttcaagcgattcccctgccttagcctcccgagtagctgggattacaggcacctgccaccatgcccagctattttttgtatttttagtagaggtgaggtttcaccatgttggccaggctgttctcaaactcctggcctcaggtgatccgcccacctcggcctcccaaagtcctgggattacaggcattagccaccatgcctggccaaaataaatgactttcaaaaaaactgcacatatttatttttatttatatttatttatttatttgagacagagtctggctctgtcgcccaggctggagtgcagtagcacaatctcagctcactgcaagctccgcctcctgggttcatgccattctcctgcctcagcctcctgagtagctgggactataggcgcccacagccacgcccggctaatttttctatttttagtagagacagggtttcaccgtgttagccaggatggtctcgatctcctggccatgtgatccgcctgcctcggcctcccaaagtgctgggattacaggcatgagcccccgtgcctggccaaaactgcacatatttaaactgtaaagtgtgataagttttgacattaataagcctgtaatatgatccatcaccttcatatttacctggagtctggtaacgtctttacctctgccttccagatgaccattgataactttgctttataatagattattttacattttctacatttttatacgtgatttgatgtcgtgaagtgtttaatctttatccctggatggtatcgtgcggtatatttattttgagatttgtcagtgatgatacttgagtagttcactcctttttatattgctgagatgacatgctatgaaatatcactgtatattcattcatctgtttatacatcattaatctatttctcatttttggcttccataaataaaactacagacactttagtacagttctttatgtaaatatgtttcttttttatgtgttactatctgggggttcaataactgaatcagaataggtaaatctatagctttttgtttgtttgtctgttttgagatggagtctcgctctgtcactcaggctggagtgcagtgatgcaatctcggctcactgcaacctctgcctcgtgggttcaagcaattttcctggctcaccctccgaagtagctgggactacaggcacatgccaccatgcccagctaatttttttgtatttttagtagaggtgaggtttcaccatcttggccacgctggtcttgaactcctgacctcgtgatctacctacctcagcctcccaaagtgctgggattataggcatgagccactgcatccagcaaatgtatagctttttaggcaacaccaaagtgtactgtaaaattaatatggttgttccctttagtgttactgtcaccagtgtccatgaattccactttcatgtttttatcgatacagaatatggatagtctttttttttttttgagacaaagcctctctctgtcgcccaggatagagtgcagtggcgtgatctcggctcactgcaacctccgcctcctgagtttgagcaattcttctgtctcagcctccctagtagctgggactacagatgcatgccaccacgcccggctaatttttttgtatttttattagagacagggtttcaccatgttagccaggaggatcttgatctcgtgatccacctacctcagcctcccaaagtgctaggattacaggcgtgggccaccacacccggccaattttttgtatttttaatagaaatggggtttcaccctgttagctaggatggtctcaatctcttgacattgtgatctgcccgcctcaacctcccaatgttctgggattacaggtgtgagccaccgtgcccagcagagaatatggatagtcttttaaatttttacccttttttataagtggatgttccttctttagtaaaatgtctatttatatattttgcttgctttttaaattcttatttatttttagagaaaagatcttgctctgtcacccagccaagagggcagtagtttgatcatagctcactgcaacctcaacctcctgggctcaagcgtcctcccaccccagcctcctgagtaactgggactacaggcacatgccagcacacccaccgaatttttaaatttttttgtagagacaggatctcattatgttgctcaggctggccttaaactcctaggctcaagcaatcctctcacctcaccctctcaaagcactatgtctggcaactcattttcttcttctcaaatgtattttgcctatttccgttttcattaagaaataaaatatggttgggccagtggctcacgcctataatcctagcactttgggaggtcgaggtgggtagatcacctgagatcaggagttcaagaccagcctgaccaacatggtgaaaccccatctctactaaaaatacaaaaattagccaggcatggtggcgggctaatcccagctactcgggaggctgaggcaggagaatcacctgaacctgggagacagaatttgcagtgagctgagatggcacaactgtactccagcctcagcaacaagagcaaaactccgtctcaaaaaaaaaaaacaaaaaaaaaccaggggtcacatcattgacccttctctctctctccctcacctacaacatgcaaagatctacttgttcctttattaaaaatataggtagaatgtctccttttctcccatctgcacggcattcacctggtccatcaactcatctgaattatgctggtaaacttccctccgtgctaactgcctcctcattaatccaggagtctgttctcctccagtgtgcaaccagatagatcctatgaacatctggattagaccacctctttccccatccaagcatcccagcatctccaaaacagatgcccagcttttcaggcaaccacattacaggcctgaatcttgacccggcttcttgttcctatgagaaagaatagatgcctgtcgtacataggtcccagctcagtcacacctcaaagcatttgcacaaaatggtatgaattcctaaaatagctttctacacctgtttccattggttgccagaaataagaacacttctattaatccttggctggtactcaggactctgagcttggtgtatccacaggttctccacgccaagaactgggaaaacatcaagtgaacactcaagacaccataatctcagacaccacacaggtagtgtcaggttcagggagagactgggacactttctctttccctgtgttggcaccataagcattttcagtgttcagaacccatgaaaataaggcaactgtgaccagctccagctgatcaaacctccattgatccctacacaaccgtaaagccaggggccctggggctaactaattaactgatttcaatcctcagtgctccttcttaccacctatggcctagaaagaagactccacttctcagtgcctcattgtcctcatcatccttattccagtctgttctctgagaggcttttgtaaacttttaaagttctaccaaggacatgaccctcttctgttcacaaatctccatacatcccaggacactcagattgaaggcacaacccctaagacaaccaatacaggtgtgactctggctcatcttcagtttttactagggcctttttttttttttgagagacggggtctcactatgttgcccaagcctgtcttaaacttctggacttatgtgatcatgacacaacatggttaccaggttctgaaatgttcatggctcagatgcacctccaagcctttgcacctattggttcctctacctgtattactctacctggggtgaagcctgtaatacacagcatttacctgagctaggtccctcagtgtggctgctgccatcaactgtgggtggagtaggcatcaccccagccagtgcctatgagcctcagacctgccacttgggagcagagatgactactcctcttgtgccttctcagtcccaacccagtactccctggcctgacaagcatgcccagaaatccctcatcctgggccttgcaactagcaccttctgggtaaagtacttctcagagctctcagccaacaatggtggtatcctccaagagcaaaccgaatgcagaccatgttacactctgagggctgctggaaagccctgctcacacctcaagggaggaagactattgattctttgtaaaagcgtcaaataggtatcacataagactctaggaagctcatcctgcacccagagaataaaaaaactatttgagatgctcccaaactttacttatctaagtggccatatcattggcatcattcagacttacaatgtgtgcactcagagctgagaacattaagtattgattgctctttaaattcatgttacccaaattattacagtcagttttgtgagtttcattgttttgttgggaacgaaagaaaattgtccataagacataatgacaggatgggtacaaaaaacagttagaaaaaatgaataagaccgagtatttgctaccataacagggtggctgtagtcaaaataatttaatcatacatatgaaaatcactaaaagggtataattggattgtttataatacaaaggataaatgcttgaggtgatggagacaccattaaccctgatgtgattattacatatggcatgactacatcaaaatatctcatgtaatctacaaatatatacactattatatacccacaaaaaataaaaataaaggctgggtgccatggctcacacctgtaatcccaccacttcaggaggcctgaggtcgggagtttgagaccaacctggccaacatggagaaaccacgtctctactgaaaatacaaaatcagctgggcatggtggtacatgcctataatcccagctactcgggaggctgaggcaggacaatcgcctgaaccctggaggtggaggctacggtgagccgagatcgtgccattgcactccagcctgggcaacaagagcgagactgtctcaaaaaataataataaaataaaaaaataaaataaattgctggacacagtggctcacacctgtaatcccagcactttgggaggctgggggcaggcgcatcacgaggtcaggagttcgagaccagcctgaccaatatggtgaaaccccgtctctactaaaaatacaaaaattagccgggcatagtggtaggtgcttgtagtcccggctactcaggaggctgaggccggagaattgcttgaacccgggaggtggaggttgcaatgagctgaggtcacgccactgcactccagtctgagcaacagagctagactccttctcaaaaaaataaaataaattaaaaaaaaataataaagatgtaatgacagggaaatagacagatgttgatacaccctgaagcaggtagtgaagctggcagttggccactggttcccacagaaaattgctctagtgatgctagcaaatcccaaaattggggctcaatccaggaggattcctggcttcataaaggaaataattcaagagcaagccaagagtgtaaagtgaaggcaaagcaagtttatgagagcaagagaacaggaaaatggctgctccacagacagagcagggctactccacaggcaaagtagcacccgtggattgttggctagctatatttatagctactccttaattatgtgctaaataagaggtcggttattcatgaactttctagaaaaaggttggagagttcccagaaccaggggttccttctcttttaaactacatgaggtagcttctgggcattgccatagcatttgtaaacggccatggtgctggtgggagtgtcttttagcatgctaatacattataatgagcatataatgagcaatgagggcaactagaattgatgttcattgccatctcagtttcactgctttcagctggtttctttagtgcatcctgttttgaccagatcctgtttcatcatgagcagggtcatgaccactgctcagaaacaagtcctgctgacctatgtcactgtttgaaatgcttattcttcagtgccataaagaaatagcacttgaggccaggcatggtggctcacgcctgtaatcccgcactttgggaggccgaggccggcggatcacgaggtcaggtgatcaagaccattctgactaacatggtgaaacgccgtctctactaaaaatacaaaaaattagctgggcgtggtggcggtcacctgtagtcccagctactggggaggctgaggcaggagaatggcatgaacccgggaggcagagcttgcagtgagccgagatcgtgccaatgtactccagcctgggcgacagagcaagactccgtctcaaaaaaaagaaagaaatagcacttgaacatagatgtatttcataaggccatttttacttcctgcagaaagggtgcactcgccagcagttttgcaacaggagcacactgaacaaagaagacagggtcatttataacctgaggcgttcaccctcctgccggtttccattgcctggaacaggacctcatattctgtatgtgtcctgattggctagcaacttagaaccttttaagaggcaaaggtagaggagaacaaagaaaggaggaagtaacttgtggaatgctgagaaaggtaaaaacacttttaaataaggaagaggaacaggctatgacctaatgcttgcttggagcagtataagcatgtcagggcaaatatttaggctaaattgtcagagctaagaacataaagtacattgatttctttattatggctagcagatatttaagaatgctagcacaagtctttcaataaatttcgcttttaagagaagttactatttattcctaattagatggggaggaaagtctttgaagaggaaactgtactttacttttaacaatattccccctctttttatttcataattcctcttcaaacttatttaatgttttgacttaattgctttttttgtccttctaagagaagtaatttttttttaatagggaggaggagagttagcagttaactctgtaacagtggcagagacaagtttttgtataaaactttgaaggtagggaatattataacagcctacaagaataagtacactaataacaagagtgaacaaggtgagaattgaagttaaaatttctttttattcactgaactaatgttttattattttagaaaaggggttatttattttacaattcttggcaaatttatcggatagggctgttaaccttggtagcgcttttgttatagttctatcaggggcagtattattaggaacaaaggtacaatactgagttttgtataaaacatttaatttattggtctttgtggggaattagacgcattaccactctgttacaactgaggcattaattttgtagcttcaccaacattaattggtttgctttcatgacactgctgaggaatcaattctttctgcagaggttctgagttttaattatgacacaaacatctcctttttctgctaattatttaaagctattttatttttctacgccatctggctagtagatcctaattgcttagctatctgtttgatggtatcctcagtgtaatttatgaattgttggtgattgtaacatagcttagtctacatttttttatagttaccagaatgatgtggatttaaattctgcagctatttgattttgtgctttaaacttatcgggcacttctcacaggaccttaatagcatttatgtaaacctgaggattaaaggactcatacgtttttcttggcctgtggtgttttgtttttacctttgtagattgatgaaatgccaggatgaaggggatacccaattggattacagcacaagtactgctccaattatttggcagagtgtccagtaaaggtcttccacttaccactatacatttgtttggggatggctaagcatggactgatgggcaaagtcttggaaaggcttgagctctttccatcatcgtttaatgcttccaaggaacactaaattttcctcctgacctgagacgcacaaagtaaactttgtgcattcagcattcagcattcagaggtggaagccggattgccatagggggctgacctgcagggtgttaaatttcaggaaatagcagagagagctcagtatgttggattatcccaagcaatgggattttgaaaaagagccaccatacagtccttatctgagtggaaaggggataatctgggattctggcctactgtgcgtacaagtgtaataatcgcttttatttgaagtgctaatggattatttaatccatttcagccaggcatttgcatcttgatattttgtcttgacagcgaaggtctgtctgtcttagatctcttatttttacaagacaccttagttttaccagatgtaggagcaactggtgtgggatctagatctgaggcagcttaagaagggaaagatgagggaataatgtgtatttttaaaataactggggggtcttttttatttatgttaattttttttttttttttgagacggagtctagctccgtcacccaggctacagtgcagtggcgcgatgtcagctcactgcaacctccgcctcccgggttcaagcaattctcctgcttccgcctcccaagtagctaggattacaggcacccacctccgcgcccggctaatttttgtatttttagtagagatggggtttcaccatcttgcccaggctggtctcaaactcctgacctcaggtgatccaccagcctcggcctcccaaagtgctgggattacagtcatgagccaccacgcccagcctacttatgttaatttttataccatagaagcgactaagggcgtgtctagagttccttaaggtggaggtggtgataaagagaaagacagggttatattgacaaggctgacagtaagaaggggtagtccttttagtgaaatagatgaggggttttaggtctgcacaaacctttttgtggaagtctaactttgctattgggtagtttgagtgatgcagtcctatttactacaatgttgccaggcagtaggagcagaaaattggtgtcttggctgcaggtcattacaacaatgagtgctaggaataactgtgtcaattaaagggctgggatataaatatttgtgtgaaaaggctagctgctgttgatcttttacatttctacaaggtatgacaaagcaagcattaaaggcaatagtctgagtgagtcagacttagttacattaataacaaaggagctaataacagaataagaaaaggaagcagtatagaaggtatatgaaaattaatctttctttaacttagtagggcttgatcctagtacagtaacccatgattctgagaggaagatgttttcttgacttgagtgtggtgggtccatttttttttttcctcagctgtgtggacggcagtctcaggggttaacagcgtaaaatagggttcttcccaggctggtttgagttttttctttctagcttttgatgaggacgtggttttcaggctggtgctggtgtactggaaattctaggggtggtacctgtgctaaaagacttttaggtccgagggaagtgaaagtggaagataaattaagtataggatttttgctgcatattctggggccttaggcgtcatggtgtcacctcctgctccattcttgttcagcgccacccaggggaggctgcagccctgccccttcttaatgtcttggccttcttgtggccttcaccacccttgctcactgtggccttcaggatgaggggccttgtgacttacctggccatcttagggccttaagaaagctaaataccattgtatatttgtcaatttttttgtatgattttatatcaaataagttaaattttatctttagtggccaggcgcggtggctcacgtctgtaatcccagcactttgggaggctgaggtgggtggatctcctgatgtcaggagttcgagacaagcctggccaacatggtgaaaccccgcctctactaaaactaaaaagtaaataaataaataaatttatctttatattaatatgctactaatattaaacttaattttagtaagatcttatagacattatctaattttaatgtctgactataaggcaagacttttacagactgtttttataatttttgttaaagagcacgttggtgctttaagaaaaatctatcgtgctttaattttaacgtccagttcacagaaaaactggatgacacccttttaactttagccaatatgtttacacacagaatttgataccctcttaactttagccagtatgtttacacacagaatttccttgacaattaacattttaaaacttgcttaaacctttaaaacaaaaaaattgtcttaacctttagtgtaggtaaaaatccatattcttatgcctccttgtaatcttattaaaagtatattttatttttcttacataccttgtaaactgtttaataataattttatatccaggaggcctaattacttttaaattatacagtatttattgcatacattcccttttatagcttttcttacgactttcacaatcttcaacatgtcttaactttctgccttccttttacactatttttttcctagtttcacctcctttgtcttcttttgatttctgtctcttccagtttctctcttactctttccttctatttctttctctcatttgcactctattttccgctctctcatcccgtttccctttcttctccggacttctcccgctcctgccgcaagcagggctgggccaccgcacaggccccgcccccgaccccgcgctgctgtttttcttttttttccccctgatttcccctcttacttttttttttttccttttctttttacacttagtttcttgggctgagtgggatttgcgtggctgcagtctgggccccgggcagtcactagcctagaggcttggcagatatgcctgccgcaaattgcaagaattacgccttttcacctcctctgctctcctcccggagccggtgcccaccctctttttcacaaaccgcagggctggggagagggacttaacctttggcctgcctgcctggctgtttggctctgcgcttgctgtttttggtttctttctcttctactggtctttcctttgtctttgccagccacctatgctgctgttttctcctctgcttccctctcccctaggggagggaccggcaggagtggagctactgtttctttccctgagaagaaagaaaaggggagttctgaatatttttcttactactggaggtttgtgtgaggttcaacccccccaacaatagggatttctcacctctaagacatcctaaggaatactttaccacccctgcggtttttctctctttggtatgtcctaaccaaggaatgctttaccatcccggctttttccttagtcccgaccaccaaggaaatactttaccggctcctgcggcttctccttccttggtctgtgcacagttgtcattccattacatgaggatctttaagctaggttgctggccagttttttttttttttgcccccattgctgagagcccaggtttattcgtcacaccgggtgggtctcaatttcttacctatgaggaccttgcaatgaagtaggggagcgctaccccatgagagaggactggagaccgcccctagagaagaatgtatccccgtacggattgccaccaaattgtttgaaatgcttgttctccggtgccataaagaaatagcacttgaacataaatttatttagtaaggccatttttacttcctgcagaaagggtacactcagccagcagttttggcacgagagtacacaactaaggagatagggtcatttataacctgacgcgtccaccctactgctatgtccggtttccactggctgggatggggcctcacattctgtatttgtcccgattggcgagcaacttagaattttttttttttttttgatggagtctcactctgtcgcccaggctggagtgcagtggcaggttctcagcttactgcaagctccacctcccgggttcacgccattcttctgcttcagcctcccaagtagctgggactacaggctcccgccactatgcctggctaattttttgtatttttcctagagacggggtttcatgtgttagccacatggtcttgatatcctgacctcgttacccgcccgctttggcctcccaaagtgctgggattacaggcgtgagccaccaccccccaccaccgcccagccaatttagaaccttttaaaagaagcaaaggtagatgagaacaaaggaaggaggaagtaacttgtggaatgctgagaaaggtgaaaacacttttaaataaggaagaggaacaggctatgacctaatgcttgcttggaccagtataagcatgccaaggcaaatatttaggctaaattgtgggagctaagaacataaagtacgttgatttctttatgacggctagcagatatttaagaatgttagcacaggtctttgaataaattttgcttataagagaagttaccatttattcctaattagggaggaaagtctttgaaaaggaacctctactttactttttagttactatgaggatcactatatcaatgtttcttaattcatatgctaaagtgcactcaatttttttttttttttgagacggagtctcgctctgtcgcccaggctggagtgcagtggtgcgatcgccaattgccgctcaatgcaagctctgcctcctgggttcacgccattctcctgcctcagcctctggagtagctgaaactacaggcacccaccaccacgcctggctaattttttgtattttccctatagaaggcgtttcaccatgttagtcaggatgatctcgatctcccgacgtcgtgatccacctgcctcggcctcccaaagtgctgggtttacaggcgtgagccaccacgccctgccctcaatttcttttttcacattgacatctatctcaaaggaagagcaacttaaccaatgcctttgtggtacacatcagtggctacaactttcacaattacagcacagataaaaaaggcatctgaataacagcataaacatggcatctgagctccaaaatttcatctccttacaagaaagtggttattttccagtgactgcaggaatagtttcacactgggtactggcattatctcagaataaatgtttttgttttattttttttgagacagcgtctaactgtcgcctaggctggagtgcagtggtgtgatctcagctcactgtaacctctgttgcctgggttcaagtgattctcctgcctcagcctcctgagtagctgggattacaggcatgtgccaccacgcctggctaatttttgtatttttagtagagatggcgtttcactatgttggccaggctggtctcaaactcctgacctcaagtgatccacccaccttggcctcccaaagtgctgggattacaggcgtgagccaccacgcctggcctcagaatcaattacaggcgcagtggctcacgactcaggcctgtaatcccagcactttgggagtccaaggcaggcagatcatttgaggccaggagtctgagatgaacctggtaacacggcaaaaccccatctcttctaaaaatcaaaaaacagccagcatggtggctcatgcatgtaatcccagctatgtgggaggctcaggtgggagaatcgcttgaacctgggaggtagaggttgcaatgagccaaaatcacgccactgcactccaacctggtcgacagtctttaaaaaaaaaaaaaaagcagccgcacgcgatggctcatgcctgtaatgctagcactatgggaggccgagatgggcggatcacaaggtcaggagatcgagacgatcctggctaacacagtgaaaccctgtctctactaaaaatacaaaaaattagccaggcgtgtttgcgggcgcctgtagtccacaggactggctgaggcaggacaatggcgtgaacccggaaggcagagcttgcagtgacctgagattgccccactgcactccagcctgggggacagagtgagactccacctcaaaaaaaaaaacacaaaaaaacacaagcagcaactcaaatatccataaacggatgaatgaatatataatgacatttcatggcagactatacttctcagcaatatacaacaaattaactcatgtctacattgatatcaaaataagcatgatgcaggagagcacccagggattataagaggaaacactttattacatcagtcagaaaattctagaaaatggaaagtattatacagcagagtaaatcaatggttgtctgcatagagaaaaactttataaaggctccaggtgaatacaaaggtgatagattagataaattcattattgtgactctgatgatggtttcatgggattataagaaaattcaagccaggagcagtggctcacgcctgcaatcccaacactttgagaggccaaggcgggcagatcacgaggtcaggagattgagaacttcctggctaacagggtgaaaccccatctctactaaaaatacaaaaaaggtaggagtggtggtggttgcctgtagtcccagctattagggaggctgaggcaggagaatggcatgaacccaggaggcagggcttgcagtgagccgagattatgccactgtactccagcctgggtgacagagcgaggctgtctcaaaaaaaagaaaaagaaaattcaagacttatcctacagctcaaatatgcatactttattggatgtcatttatatattttatttttgaaacagggtctcactctgtggtccagactggactgcagtgttgcaatctcggctcactgcaacctctgcctcccaggctcaagcaaatcctcccatgtagcaatcctcccacatgacagctctcctgtgagttatgcagccagacttctggataaatatcctgtatttgtcacactagtaaggccttcattcagtgttaactataatcctgaaggaatacagaggtgtggctacaaaactgcccaaatttattttacttgtaaggactcttctctagtgtgaactctccaatatccaaggagagcagacctttgggtaaacattttccacatttgctgcaatcacaggatcttactcaggtgtgtattctccaatatttaatgagactggactcactgcactcataagccctttcttttgtgaactctctgatgatgacgaagtgaagagatttgcctaaattttttttcacattcactgcacccgtaaggcttttctccagtgtgaactctcctgtgtttagtgagactggagctttcggcaaaagatttcccacattcactgcactcataaggcttctgaccagtgtgaactctcttatgaacacggaatgtagagctgtgggtaaatgacttcccacaatcactgcattcatatggcctttctccagtgtgaactctctggtgtgcaatgaggtggtacttgtgcctaaaaaatttctgacaaacctcacactcatatggcttctctccagtgtgaattctctggtgtacaaggaggtgggacttactgttaaataatttcccacatatcccacacgtataaggtttttctctagtgtgaactccttgatgattactgaagctgtcatatttgctagaggatttcccacattcacaccacacagaaggttcttctgtagggagcagtctctcgtgctgactgagtatatctttggtgctaaaatgtttcatgcatcctccacagctgtaatggctttttcccccatgaaacagagacacacactcagttttgctgtttgacttcccagtgtgagtggcctcttgctggagtaatcctgacctgagcaaaaagtctttcccactctcactgaagacagatgactcccctgacacatgcaacttacacctcttcgcaaacaacgcctcctcaacactccctctgtagggtttctctccaatgtgctcattctggtgctgatgaaagtttccactgtcatacaatttattcccccaggcctcacacctgtgcagtttctgcttgtgatgtgttccctgatgatctgccacatgcaaaatgtctcccaagatcgggccacacatctcacaggggtgggccttcttgggagacacacctgccataggagtcctgacctgagtctctctttgtatataaatactctgcttagaaggtgccgcctcatcttccactccacaccaacaacctgaaagcaagaaaatgctggtgaagtgcatgttaactctggtgggaaggcacagaccacccacaagtgtatctgaaaaactgaggaattactccaaggaagtacttggaggaacaggatgttggcttcaggtggaagatggtgctatgtattattactggactataatggtcacagaatgtaggaggcctcataacataaaggacacaaccatgtatgtaacacagggagtagaggcagggtctacaatccctgcatctgcaaaccactcatctgcagaatttatgtcctcatgacatgcgagtgctgtagagagggatttgtccaggccaaggaaaacacaagcacaacacagcagcttctgcttgaggacagtttaacaaagtgtacacatttgctaacacaaaacctgtatgctaatactggaaaccactgcagatgaagatgtgaataaaattaagatgtgaggtccagagatgtgaagattattcaggggaataaatatcagactacaagctcatgtacaaatcagttaaaggatttaaaaaaaaaaaaagtacaactgacaaggagtacaactgacaattctgaggttcttaacaatggggaagaggccagtaccagtggctcacagctgtaaacccaatgtaggaagatcacctgagcccagaaatccaagaccagcctgggaaacatggtgagaccctgtctctacagaaattatttttaaaatggccaagcatggtgactcatgcctacaatcccagcactttgggaggctaaggcaaagggatcactcaggcccaggagatcaagaccagcctgagcaacacagcaaaacctctctacaaacattagccaggtgtgatggtgtgcacctgcagtcctagctactcaggagactgaggctggaggatcacttgagcccaggaggttgaggctgtgtgaactatattcacaccactgcactccaggtaacaaaaatgacagtgtgagaacctgtctcaaaaaagaaaagagaagaggagaggagaggggagggaaagggagaagagggaagaggaaagagaagagagaagaaaagggccaggtgtcgtgggtcatgcctgtaatcccagcactttgggaggcagagctgggcggatcacctgacgtcaggagtttgagaccagcctgaccaacatggagaaacactgtctctactaaaaatacaaaatattagcctttggggaaaagaaagagagatcagactgttactgtgtcgatgtagaaagaagcagacataagagactccattttgttcagtactaagaaaaattattctgccttgagatgctgttaatctgtaaccctactcccaaccctgtgctccagaaacatgtgctgtgtcaactcaaggttaaatggattttgggctatgcaggacgtgctttgttaaacaagtgcttcaaggcagcatgcttgttaaaagtcatcactactccctactctcaaggacccagggacacaaaacactgcctaggaaagccaggtattgcccaaggtttctccccatgtgatagcctgagatatggcctcatgggaagggaaagacctgacagcccgacgccagtaaaggggctgtgctgaggattagtaaaagaggaaggcctctttgcagttgagataagaggagggcatctgtctcccgctcatccctgggcaatggaatgtctgggtgttaaaacccaattgtatattccatatactgagataggagaaaaccgccttagggctggaggtgagacatgctggaggcaatactgctctttaaggcattgagatgtttatgtatatgcacatcaaaagcacagcacttttttctttaccttgtttatgatgcagagacatttgttcacatgttttcctgctgaacctctccccactattaccctattgacctgccacatggtagagataatgatcagtaaatactgaaggaactcggagactggtggcggcagggggaaggcagggttcctccgtatgctgagcgccagtcccctgggcccacttttcttttttttttttattttttattctttattgagacggagtctcgctctgttgctcaggctggagtgcggtggcacaatcgcggctcactgcaagctccgcctgccgggttcacgccattctcctgcctcagcctctccgagtagctgggactacaggcgcccgccaccacgcctggctaatttttttgtatttttagtagagacagggtttcaccgtggtctcaatctcctgacctcgtgatccgcctgcctcggcctcccaaagttctgggattacaagcatgagccaccgcacccagcccacttttctttctctatattttggatctgtgtctctttcttttctcaagtctctcattccacctgacgagaaacacccacaggtgtggagaggcaggccacccttcattagccgggcatggtggcacatgcctgtaatcccagctactcaggaggctgagggcagaattgcttgggcctgggagacagaggttgcggtgagccagatcgcaccattgcgctccagcctggacaacaagagcgaaactccatctcaaaaaaaaaaaaaaaaaaaaaaacaatggagaaggccaggtgcagtggatcatgcctgtaatcccagcactgtgggaggcaaaggcaggcggatcatgaagtcaggagtttgagaccagcctggccaatatggtgaaaccccatctctactaaaaatacaaaacatagccaggcgtggtggtgcacgcctgtagtcccagctacttgggaggctgaggcagaagaattgcttgaacctgggaggtggaggttgcagtgagccaagatcgcaccactacactccagcctgggcaacaaagtgagactctgtctcaaaaaaaaaaaaaaaaaaaaaaattagctgggcataatggcatgcacctgtattcccagcttctcaggaggctgaagcaggagaagtgcttcagcccaggaggcagaggttgcagtgagcagagatcaagctactgcactccagcctgggcaacagaacaagaccctttctcaaaaaacaaacaaacaaaaccaaaaacaagaatgaaggagaaaagacgatacagaaatcatgtgtgcttacttgtctggccccaaaaatactactgaaatagaagaggtttctgtcatgatttgaataaaactcttgacatcatgcaccactgtcctaggatgctatttttcagggactcagaacccataatgctgaggccagattcatttgcatcttctgaccacagaagatgatcccaccaccaagataaccaagtacatgagacatacatgatgtaagaacaaagggaaagacagaacaaggaaacagccaacactggcttagaacaactcagcacatgacagcagacaggaaacaatattacaaaaagaatttctgttttttgagacggagtcttgctctgttgctcaggctggagcgcagtggcacaatctcagctcactgcaacccctgcctcctgggttcaagctatcctcccaccttagcctcccaagtagccaggattaaaagcgtgtgccaccacacctggctaatttttatattttcagtagagatggggtttcaccatgtcggccaggctgttctcgaactcctggcctcaagtaatccacctaccttggcctccctgagtgcagaaattataggcatgagccactgcaccagacctatgaagagaatttctaaggacggtattacaagaacagtctatagtctatgtaggcagtgacaatgtcaatgaagacaattcctggcacagggaggcatgaagaaataacaggtagaggaatgaattagatcccgaacctgaaatctggatgaaatcacacaaacatccacaggacaaacaaggtagcctgcattaagttgcctgtaagacttctgactctgaattcttccctgggagctcaatagcaggtgttggggctgctccaagaatggagagggcagtatgcatacctcagtcctaccaaccaagaactgaagtaggaagctgtgtccatgctcctgacatgagaaagtcttgccaatagaaaaagagggggaaagacagagactagctcaggtcacaggggtgagtgtgggcaacttacccagggaggacataagtgccaggttctccagcgtcacatcacggtacaggcatctctgagcctcactaaggagattccattcctcctgggtaaatttcacagccacgtcttcaaaagtcactgtgccctgttatgatgttgacagatgaaaccacaaaccacccctatgctgaggtatcacaatccatctctcccacacatctactctcgcacatcctcctctcaaggtcctcaaacataggagaaactaggcccactggtcatggggtacagccaccaacaacaatagttagttgaacaaataggtatctgtgcggtggctgtgatataagagtccaccccctcctgacaggcacttcccctagtatggccgaggtcatggaaagcccaatgtggcaccttcagcacagcagagataccctctctgaacgcacctcattcttttttttttttttttttttttttttttgatacggagtctcgctctgtcacccagggtggagtgcaatggcgcgatctcggctcacgcaacctccgcctcccgggttcaagcgagtctgctgcctcagtttcccaagtagctgggattacaggcatgcgccaccacgcctggctaattttgtatttttagtagagacagggtttctccatggttggtcaggctggtctctacctccggaccaacccgcctaggcctcccaaagtgctgggattacaggagtgagccactgcacccggccccaccctccactttcttgtatgcgttccttaaatgcttctacagccataaaggcctgagggaagaggctgactttacaggactgtgtccctgataggatctggtaagctcaggcctccctgaacgcttttgtgtccacggagccaggtgaccttggactattgtctaacctgcgtgtctcagcacaaagtgtcatctctaccacctatatgatctacaaggattcaatctcaaagggccccaacgtcatcccctctctactctgttatttatttggcctttaggaaactttaaaagcctggactttgatccagtcccttctttcttggaaattctcctatttctagtgtcctcgcaatgatttcacagcccccagcctccttgcttttccaggaggagttccgcctcacaggttgttccctacaggcgcctgtggaccccaggttccatcctcccggatccgtccatctccaggccattgcccgcgcccctccctgtacctgtcgctctccccaccgcatcccacgggtgtctgaaacagggatccctcccgagagcgcctcagtgtcccgacgccgggtccgggttgcagagccgtaaacaggtgccgctccctcgctgctttaggacttgtgtgactaggaggtgaccggagagcacggaaggcgccacaattacctgaacggggaaccttagcgcggccgccgccatgggaccacgtggggtaagctgggttgagagcagcgggcgccgttaaagagctgcagagtcacgtctgtgcaaagagaagaacgactctcgacctcctggatccagtcaccaccacggtcccaacacagcgctccaaggactccctaacgccaatggaaatggtcgctactaaagggcgccgggagtcccgcctctaccttacttgcgcacacggaaacgccttcaatgtgaactctcactggctctgccgtgctgtcatttgacgcagagctttctgggtaatgtagtttcccaggttccaaggccgtaaagagagagattcccaggggcgcttcggaaggaaaagcccagctccacctccggggccctcagggaagcctcctgacccgcacggtggcgcgcgcctgtaatcccaaattttgagaggctgaggtgtcaggactgcttgagcccaggtggtccaggctgcactgagctatgactgcaccactgcactccagcctgggcgacagaacctgtctcaaaagaaaaagaaatgttaattaagcgtttgtgctgttaagggaggagaccacctctcatattgttttatgcccaatttctgcctccaaagaaacaagtaaaaactaaaaggcagaaatgaaatccacaggcagacagccaggtgccaaccctgggcctggttaaagatcgacccctgaccaaaccggttatgttatctatggattccagacattgtatggaaaagcattgtgaaaatccctgtcctgttctgttccgttctgattaccactgcatgcagcccccagtcgtgtaccccctgcttgctcaatcgatcacaaacctctcatgtggacccccttagagttgtaagcccttaaaagggacaggaattcctcacttggggagcttggtagttggagatgtgagtcttgccaaagctccaggctgaatacagccctgcggcttgtcctgctacatttcttggttccctgactgggaagccaggtgattaacagatagtcgaggcagccccttaggcagcttaggcctgccctgtggagcatccctacaggggactctggccagcttgagggacgcagaacctgagagcactcccgggtaggcaattgccccagtggaacacctcgccagagtggcgtgtggcaggcccccacagaggatcaatgcagcggctgaacactgggaaggaacaggcacttggagtccggacatctgaaacttggtaagactagtctttggaacttgcccactccatttgagtggaagggtggcctgatcacccacggcatgcctgtaccggcactttggtttttgtttttgacttgatttggattgcttgatactttcgttttggttttgacctggcttggatttctggatactctgatttggattttgattctggtttggtgtaaacggtaaaagtgtatgtgtgccctttttacctgttctttgttttgtggtgtgcgtgtggtgtgagcgtggtgttttgtctcaaagaagcatgggtcaggcacaaagtaagcccacttcactaggaactatgttgaaacatttcaagaaaggatttaagggagattacagtgttactatgacaccaggaaaacttagaactttgtgtgaaatagactggccagcattagaggtgggttggtcatcagaaggaagcctggacaggtcccttgtttgaaaggtattgtgtccagaattggttccttccggtgggttcttggtctcgctgacttcaagaatgaagccgcagaccctcacgggcagtgttaaagttcttaaagatggtatgtctggagtttgttccttcaggtgttcagatgtgtctagagtttcttccttctggtgggttcgtggtctcgctggcttcaggagtgaagtggcagaccttcgcggtgagtgttacagctcataaaggcagtgcgggcccaaagagtgagcaacagcaagatttattgcgaagagcgaaagaacaaagtttccacagtgtggaaggggacctgggcgggttgctgctactggctggccagcttttattcccttatttgaccccacccacatcctgctgattggtccattttatacagcgacagagtgagactccacctcaaaaaaaaaaaaaaaaaaaaaaagaagaatctcattttgaagccaaaaccatcagagtgaccattccaattatgtgctgagcataattccatctcttagacatcagtgctaacatttctctgaggccctaagttttttcaccatctactgatgtttcctcagaactacttctgtcagaactgttgaataattacctagtcagtgttttttgtttttttttttcacacagagtctcgctctgtcgcccaggctacagtgcaacggctcaatcttggctcactgtaacctctgcctcctgggttcaagtgattcttctgcctcagcctcctgagtagttgggatgacaggtgcgtgccgccacgcccaactaattttgtacttttagtagagacgaggtgtcaccatattggccagggtggtctcaaactcctcacctggtgatccacccgcctcggcctcccaaaatgctgagattacaggcatgagccaccatgcctggcctatctagtcagtattaataggctttcgtatcttgcattttacaactgtttctctcatgtaattttaatttttcatgcagaacactccctgctctcttaagataaatcaatgataatcacttcccatcaatgacatgaactcatggatttaacaaatgcccagtatgaccagatggagagcactacctttaaggactgtagctattaccactatcaagctaccaaatcctttattgttgtttatatatataaaactgacttcaaattcctaaaaggagttgaatataagttagaatatcaagtaaaggatactaagtgggtaaaagtgtggtgcaattaattgaatgctacaattgatttgtgaaccccccaaatgtgagacaggtctcagttcatttgaaaaatttattttgccggccaggcgtagtggctgactcctgtaatcccagcattttgggaggccgaggcaggcggatcacgaggtcaagagattgagaccatcctggccaacaaggtgaaaccactaaaaatataataattagctgggcaaggtgctgcgcgcttgtaggcccagttactcgggaggctaaggcaggaaaatcgattgaacctgggagacggaggttgcagtgagccaagatctcgccactgcacttcagcctggcgactgagggagactcaatctaaaaaaaaaaaaaagtttattttgccaaaggtgaggatgcatgcccgtgacacagcttcaggaagtcctgacggcacgtgcccaaggtggttggggcacagattgtatgttttgttttgttttgtttgagacggagtcttgctctgtcgaccatgctggagtggagtagcgcgatctctgctcactgaaagctccgacttctgggctcatgccattctcctgcctcagcctctctagtagctgggactacaggcgcccaccaccaggatggctaatttttttttgtatttttaccagagacggggtttcaccctgttagccaggacggtctggatctcctgacctcatgatctgcccacctccgcctgccaaagtgctgggattacaggcctgagccaccgcgccggctggtttaatacattttaggggggcatgagacatcagtgaatatttgtaagaattacatcggttctgaccagaaaggcggggacaactccaagcagggaggggacttccaggtcacatgtaggtgagagacaaatagttggattctttttagtttctgataagtgtttccaaaggaggcaatcagactatgcacctatctcagtgaggagagcaatgactgaatagaatgggaggcaagtttgccctgagcagttcccagattgacttttccctttagcttagtaattttgaggccacaagattttcctttcacagattctatcagcaggagagttgttttctgtaggaatcacagagattcagctttgcactcctgctgtaggggagcacatccctaacttccttcatttgccttaggcactctaaggcttctgagggccttcagacacattataacacaacaacgcttatcagcttctgcttccagtgcaggtattttgcgactgaacgactgtttcaaacggtgtggtaatttggatttttagcctttgggagaatcctaaataatagtttcagcttgagctccctattatttaccttgagctccccgaaatctgaagtagtatttttccaaattcttgagtgattagttacagacactagtctccaggaatctcaatacggcttctaaggctaggtgagacccctcctctgccctagaaaggcgccttttttttttttttttttttttttttgagacagagtcttgctctgtcgcgcaggctggagggcagtggcgcgatcccagctcactgcaaggaggttcacgccattctcctccagcctcagcctccagagtagctgtgactataggcgcccgccaccacgcccagctaactttttttttttgaatttttagtagacacggggtttcaccgtgttagccaggatggtctcgatctcctgacctcgcgatccgcccgcctcagcctccaaaagtgctgggattactggcgtgagccaccgcgcccggcctcagggcgcgcttttaaggagagttcctgacatgacggtgggcttttcctgcagatgcacctctgggtagcgccctctttacagccttgaaacctggtcaactacattactcagaaagctctgcgttgaatgaatgccgtcagagccaatgagggctcggaaagaagcatttccgtgtgtgcgcctaatgtagggccgagacttccggggtcctcttgtagcggccacgttgatctgcgatacgcgtgtttgcccagtgagtggccccggactgctacgtgggactgcggtgaatgaacccagaaggtggagaggaaccgttctcggtgcacagaggcggctctgcagcccggtgagggcgcctgctgctcccgggcagtgctttccccaagtagtccgatggctgcggctgcgccgaggcgccctactcaggtaattgtggcgttttctgtgccctcaggtcacctcatcgtcacccaggtcctaaaccagcgagggagaggctcctgctcacgggtctgtagccggtacccggcgtagggacactgaggcgctggcaggaggggtccctgtgtaaacgtccagtggattcaccttgccagctgcctagagagagccgatttgtgaagacaggggaattgtaaggagaaatagtaattcacgcagagccggctgttcgggagacaggagttttattattattcaaatcagtctccccgagcatttctggatcagagttttcaaagttaatttggcgggtaggggcttgggaagtggggagtgctgaacggtcaggttggagatggatttatagagggttgaagtgagtttttcatgctgttttctgttgtgggtgggatggcagaactgattgacccagattaccggtctgtgtgttgtcagctgatccatccagtgtaggatctccaaaatacctcaagcactgatcttagcttttacaattgttatgttatcttcaggagcaacttggcgaggttcagactcttggagccagaagctacatgacccctaaacggtaatttctaatcttatagctaaactgttagtcctgcaaaggcaggctggtccccaggcaagaagggagtcttttcaggaaagggctgttatcaattttgtttcagagtgaaaccatgaactgaattccttccctaagttaattcagcctgtgcccaggaatgaacaaggacagcttaaaggttaaaagcaagatggagtcggttaggtctgatttctttcactgtcataatttcctcagttataattttgcaaagacggtttcacctgtgtttgacatcagtgcgatgcggtggggagagcaacaggcacagggaggggcctaggcgatggtctggagatggaggcagctgggaggatggaacctggggtccacaggcacctgtcgggaacaaagtttgaggcagagctactcctggaagagcacacaggctgagggctgtgcattcatcatgaggacactagaagccatggagagttttgaagaaaggagggacatgatccaaatccaggcttttaagatttcccaaaggccaatcaaaggaagaacattgtagagagagaggatgaggactttggggccttgggaggttgaatcctttttgtagctcacataggtggtagagatgacattttgcactgagacaagcaggtcagacaaccagcctgagtgccacctggctccagggacaagaaagggttcagggaggcctgagcttatcaaatcccgtgacatgtttgtaatgtctgcctctcccctcaggcactcctggctgcagaagcacttagggaacccacacaggaaagtggagggtgttcaatcccctcattggtcctgacgccatctacaggttctctagcttgtggtgtcctgggactcttaagtgccatttttttcagtcctttgatccgaggaccctggagaatctctgaagccaggataccaagtccatgacaggttatatggaggtattcccatttctgtcaaccaatgtaaacacccttgtaagattaacccaggatttgctaccaggttgtgaaatgcttagagataaaacggatcaaagtcaggaggtgatattaccacagttctacctggctacaggcttcatctggttggaccttgttgcatagactgtgggttgagggaagaggaagaaaggtcagagataaggctcctgccataatctaggtgaggcttaatggatcagatatgtggtaaatcacatgggtctggattcaggattcactttttgtaaaaagacagctaggttttctttctttctttctttctttttttttgagacgcagtttcggtcttgtcacccaggctggagtgcaatggcatgatctctgctcactggaacctccgcctcccgggttcaagtgattctcttgcctcagccttccgagcagttgggattccaggcatgaaccaccacacttggctaatttttgtatttttagtagagacgaggtttcaccatgtcggccaggctggtctcgaactcctgacctcaggtgattcacctgcctcggcctcccaaagtgctgggattacaggcatgagacaccgtacctggcagacagctaggttttctctctctctcttttttttttttttttgagacggagtttgcttttgttgcccaggctggagtgcaatggcgtgatctcagctcaccgcaacttccgtcacccaggttcaagtgattctcctgcctcagcctccccagtagctgggattacaggcatgcaccaccaccctggctaattttgtatttttagtagagatggggtttctccatgttggttaggctggtcttgaactcccgacctcaggtgatccgcacgcctcagcctcccaaagtgctgggattacaggtgtgagccaccgtgcccggccgacagctaggttttctaatgtgggtgataagagcatgaaagaggaattgggcatgagcccaaggtttttgatctttgcagctgtaaccatggacgctgcatctgctgacatgaagttggtattgacaacaatattcactgtggatagcaagagggttgttttggccatatgaagaatcagagaccaataagtggtggcatcaaatggataactagacatacaggatgggatatctgggagggtgttgataatggagacatccaatatatgaaagctaatgagcgaactacagtaagttagttatgggtccatttaggaggacatgcttcagattttggtggtaaatcttttcaggggccaggaaggtgtgactacaggctgaggagtggatctcttacttacgtccctgagtgatgttattgggcttcctaaacacctgagagggtgtgagtgaccatcatggcaggatgtatcagacagtagagtttggaaggggacatagacatccgaggagagaatagacgagatagatgcatgcagaagcataggagtaattcagggaagatgacacttaggcctgagttggtgccaaagttgtaactatttatcactgtctggactcacaaacgttttgagatgactttgggagtgcctggggagtttcattcagcctggtgcatatgggcagtgaaaaatatgctcatctgtgatagtagatgtggtttggttcacaaatccaggggctgggctttaaacggcattaggtggacagaggagggttgctacagctgaggtctcagctggtgcagcacagaagtggaatagggccatggatatctaaagccatatgtggttctgtgtggctatggagtcattccgggagacattcacaggatgatttgggattaccactgctattgtaaaccatggaaattctgtgttaatattggatgctatttgtatttgtcaagcatagtctggatgtttatccacattttggtataaggccagaattgaaggcccaatatgatgtgtcactttgacatcttgtgatagtgggacaaccttaaaaggtgtgagcacaaatctcatctcattcccactctgctctcttgaataatgtatcctagcctaacaaccctttttatcaaggcaatgaggcagggttcctctgggggaaagaaagagagatcagactgttactgtgtctatgtagaaaaaggaagacataagaaactccattttgacctgtactaagaaaaattattctgccttgagatgctgttaatctgtaaccctagccccaaccctgtgctcacagaaatgtgctgtattgactcaaggtttaatggagttagggctgtgcaggatgtgcctttgtaaacatgtgtttgcaggcagtatgcttggtaaaagtcatcgccattctccagtctcgggtacccagggacacaatgcactgcggaaggccgcagggacctctgcctgagaaagcctgggtattgtccaaggtctcccccaactgagacagcctgagatgtggcctcatgggaaaggaaagatcttactgttcccccagcctgacacctgtaaagggtctgtgctgaggaggattagtgaaagaggaaggcctctttgcagttgagataagggaaggcacctgtctcctgctcatccctgggcaacagaatgtctcagtgtaaaacccaattgtatattccatctactgagataggagaaaaccgccttagggctggaggtgagacatgctggaggcaatactgctctttaatgcattgagatgtttatgtatctgcacatcaaaagcacagcacttttttctttaccttgtttatgatgcagagacatttgttcacaggttttcctgctgaccctcttgcctctattaccctgttgtcctgccacatccccctctccgagatggtagagataatgatcaataaataccgagggaactcagagaccagtgccatcagggttcctccgtatactgagccccggtcccctgggcccacttttctttctctatactttgtctctgtctcttatttcttttctcagcctctcatcccacctgatgagaaatgcccacaggtgtggaggggcaggccaccccttcactctctcagttatttttattacaccagtaatttcctcattgtgttgaatcttacagtggcttataaatcgatatgtacctagaaatgtttagccagttcatgtatatttgatgtatcacattttttcctttgaatcacatactctaaaagaagtaacttcctcttactaacctctgcttttcctaagtgatgaattaatcctctttagataattacaattctcttttcaacacttagcaagaactaatctataaagaagcactataaatctataaagaactttcccacccgggcacagtggctttggttcaacgcttctccaccttttggctaagatcaagtgtgagatggagtttcgctctcattgccccatctggagtgcaatggtgaagtctcagctcactgcaacctccgcctcccgggttccagtgattatcctgcctcagcctccggagtagctgggattacaggtgcctgccaccacacctggctactttttaatatttttagtagagacagggtttcaccgtgttggtcaggctggtcttgaactcctgacctcaggtgatccacctgcctaggcctcccaaagtgctgggattacaggcatgagccagtgtgtccggcccccagcatcattttcttcagagaatattcgaggaatctttttatggcttggcttcctttttttttttttttttttttaatttgagatggagtttcgctcctgttgcccaggctggagtgcaatcaatggcacgatctcggcccaccacaacctctgcctcccagttcaagcaattctgcctcagcctcccgagtagctgggattacaggcatgcacaatcatgcccggctaattttgtatttttagtagagaccaggtttctccatgttgatcaggctagtcacgaacgcccaacctcaggtgatccacccaccttggcttcccaaagtgctgagattacaggcgtgagccaccgtgcccggcaatggctgggctttcattgggtgtgaagtctacaaacagcatcttcaatttaaactgtcagttaaagttcttaagatttaggaaatgatggagcttggaaagttatgagattacaaaattccggaaagtccattagaaaaaccacaggatggaaaaaaaaataagccaggcaacaaagcttcagaggtccctgctggcccagggagagatacctgcagtgtccagcatctcagtgaacatgatctactttcaaaggcaggggcttaaagcgagggaagggggggaactggtggaagcaaaggctctccccatcaccaccttggttttaggtagggattttaatttaactgaaggacatctctcaacttggacaataattaatccctcaacagcacctcatatctgctatgactttgcagcgcagcagaaagaatgtttagtatctaatagataaaaatttcatcgaaaaaattaaaatattcttgcaacacccccccaacaccaattcctattctaaagtgaatctatcacttgtgctgttgatacttgaccatgtacttaattggaaacctagatgcaaaagactgaaactgaatcttcaccccaaaatgaaaacaaaataaaatgagtaacttgaggtttatggcatatagtttaggtaaacacacacacaaggagaagggggaagaggaaatggaaggtgtcggaagcaaagctgagtgacagaacacattcagtcagggcagatgtctatacagagtgtagtggaacctcaggaaaagcttcatatggattcatgcgcacgcgtctggaggcaccagatccctccatggcagatccaagaacagggagctgagggagaaggccattcccttcattccagttttaggagctccacatcgaagacgagagtggcgtgtggtgggatgatgcctgggtgcccagtggcaccgtaggcagaatctggagatatagtcagttgggctgtctgacccacactcatctaagcaaccctttcttcccagcctcggatcacctcctgctaaaaattaaggggcttgtttctgtcccgggaggaatcaaatttctttccatcttcaagcatcccggtgtagtgcaccacgcaggtctggccgtgcctcgggaaggtgcactcctctcctggggagatggtttccacctgcactcccatggcggcggccgatgctgggtgggcgggtagcgcgacgggcggtgtggaccaacagcgacctggcggcggttccacagctctggctagacccttggcttttatttatttatttatttatttattttttgatacagagcctctctttgtcacccaggctggagtgcagtggcacgatcttggctcacagcaacctctgcctcccggattcaagcgattctcctgcctcagcctccccagtagctgggattcatgcccagctaatttttgtatttttagtagagacggggtttcaccatgttggccaggatagtctgtagctcttaacctcgtgatcccctcacctctgcccagagtgctggggttacaggcgtgagccactgggcccggactttttttttttttttggccaggcgcggtggctcacacctgtaatcccagcactttgggagggcgaggcgggcggatcacgaggtcaggagatcgagaccatcctgactaacatggtgaaaccctgtctctactaaaaatacaaaaaattagccgggcgtggtggcgggcacctgtagtcccagctactcgggagggtgaggcaggagaatggcgtgaacccaggaggtggagcttgcagtgagccgagatcatgccactgcactccagcctgggcgacagagcaagactcaaatcaaaaaaaagaaaaatcgacccctgacctaatcagtaatgttatacagattacaaacattatatagaaaagcattgtgaaaatccctgtcctgttctgttccgttctaattaccagtgcatgcagcccccagtcatgtaccccctgcttgctcaatcgatcacgaccctctcacacagacccccttagagttgtgagcccgtaaaaggtacgagaattgctcacctggggagctcagttgttggagatgtgagtcttgccgaagctcccagctgaataaagcccttccttctttaactcggtgtctgaggggtttagtctgcagcttgtcctgctatacctacgatttcatctccaacccaaccaatcaggactgcccacttcatggccccctatctaccaaattatccttaaaaaaccccagtctcatgaggtggaggttgcagtgaaccgagatcatgaccttgcactccagcctgggcaacaggagcaaaactccatctcaaaaaaacaaacaaacaaataaacaacaacaaaaaaacccagtctccaagttttcaggaagactgatttgagtaatattaataagactccagtctgctgttcatccaactctgtgtgaatcaaactctttcttttacaattctcctgtcctgataaattggctctatctgggcagtgggcaaaatgaacccgctgggtgtttacacattcattttaacaatacaataatggttattaacctttgcattaatctctgcttccagtggaagaattttgcatcaaaggaccacttgaaatgataggtgaatttagatctatagcctttgggagcacctacactaactctgaaataatatttttccatacactagggtaatcagctacagctaataattgcaagaaatctcaataggagttttaaggaaaggcaggatgatcctctgcccagtagaaagatctgcaatcttttatttatttatttatttaattttatttttttccaatacagagtcttgctctgtcgcccaggctagagtgcagtggcacaatctcagctcaccgcaacctctgactcctgggttcaggagattctcctgcctcagcctcctgagtagctgggattatatgcatatgccatcatgccaagctaatttttgtatttttagtagaggcggggtttcaccatgttggccagactggacttgaactcctgacctcaggtgatccacccgcctcagcctcccaaagtgctgggattacaggcgtgagccacccacacccagcccttatttttattttttagagaagaggtcttgctctgttgcccaggctggagtgcagtggcacgatctcggcttaccgcagcttcaaactcctgagctcaagcgattctccctccttcaggctccctaaccctaaccccaaccttggggcagctgggaccactggcctgcctgacctcaccccactaatattttttattttttgcagagacaggatatggggaaaagaaatcagattgttactgtgtctatgtagaaaaggaagccataagaaactccattttgatctgtattaagaaaaattgttctgctttgagatgctgttaatctgtaactttagccccaaccctgtgctcacagaaacgtactgtattgaatcaaggtttaatggatttagggctgtgcagcatgtgccttgttaacaatatgtttgcaggcagtatgcttggtaaaagtcatcgccattctccattctctattaaccagggacacaatgcactgcggaaagctgcagggacctctgcctgagaaagcctgggtattgtccaaggtttcccccactgagacagcctgagatatggcctcatgggaaaggaaagaccttacatcccccagccggacacccttaaagggtctgtgctgaggaggaggagtgaaagagggaggcctctttgcagttgagataagagtaaggcttctgtctcctgctcattcctgggaatggaatgtcatggtgtaaagccaaccattcccattcgttgtattctgaaataggagaaaactaccctgtggctagaagcgagatatgctggcagcaatactgctctgttgctctttgctacactgagatgtttgtttaaagtgaaacataaatctggcctatgtgcacatccacgcacagtacctttcattgaacttattcatgatacagattcctttgctcacgtgtttccctgctgaccttctccccaccatcaccctgttgccctgccacactcccctcaccaagagagtaaaaataatgatcaataaatactgagggaactcagagaccggcgccggtgaaggtcctcacatgctgaatgtgccagtcccctgggcccactattctttctctatactttttctctgtgtctaatttcttttctcagtctctcgtctccacctgatgagagatacccataggtatggaggggcaggcccccttcaaacaggattttgctttgttgctcaggctaatctctaactcttggcctcaaatgatccttctgacttggcctcccaaactggtggaattacaggagctagccaccataccagtcagggcgcatatcttaaggatactcctgaggtggagctgggcttttcctgcagaaccgcctctgggaattgtgccctttaccctccttgttacctagggaactacattacccagaaaactccgcatggaatgacagagtggaagagccatgggggctcagaataaaggcatttcctgtgtgcacgtgacaatgggtccggacttccggcgccctctggtggcggccattttgattggtgttgggtttatttgtcggagaggctcctgagcgctaggtcggcactgcggtgactgaacccagaaggcggagaacagttgtcctctgctgcacagaggcgactctggagctctgtgacggcgccaagcgtgacccacccctgggccaggatagggaccgtcatgcccatatctcctggctggtcaccctctcctcccaaccctgctttaaaccacgtggttcgatggcggtggtggccacgctgaggctctctgctcaggtaattgtggtgccttccatgccctcaggtcacctcatcatcacccaaaagcctgtagtcttgcaaggaagagtctttaaggtggcagagccataggcagcagatgctgagtttttattaggagtgactgtcaggacagcccttttgagctgctgaaggcctaatcttttatagtcactgtacctgagcgagttagagaaaacgccacactttgagacgaattaagagtccgtttatttaaaaaaaaatccgtttatttagccggcggccaagagatgggtaacgctcaaagttctcgcggccccaaagaaggggctagattttcttttatactttggtttagaaaggggagggggggtctagttaaaacaattttacagaagtaaagtaggcaagaaaagttaaaaggataaatggttacaggaaagtaaacagttccaggtgcaggggctttaagactattagaaggtgatagatggggggctttgggcgttatcaatcagacgaattcctgggaactgcggatatagctcgccacagtatcttatcagttaattgcattcttggatgtgctgggagtcagcttgcacaagttaagtccttgaggaaggggctgccagtgaaagagccaagatggagtctgtctggctctcttatgtaagggagagtcaattcaggtggaaacaagtctaggtgattaaaggaaagggagaatctaaaaacagggttagtaaaaacaaggttgggcattacatcacagaatcctctagtgagaactgatagtggaacagtgtgctcgttggtgaccttacctcgttagatgcagtctttattttttatttttttgagacggagtttcactcttgttgcccaggctggatgcaatggcgtgatctcggctcaccgcaatctccgcctcctgggttcaagcgattctcctgcctcagcctcccgagtaggtgtcattacaggcatgcgccactgcacctggctaattttttgtatgtttagtagagatggagtttctccatgtaggtcaggctggtctcgaacacctgatctcaggtgattcacctgcctcggcctcccaaagtgctggggttacaggcgcgagccaccgagcccagcttattttatttatttattttttttttttttgagacagagtctcagtctgtcacccagcctggagtacagtggcgtgatctcggctcactgcaacctccgcctgccgggttcaagcgattctcctgcttcagcctcccaagtagctgggattacagacacccgccaccatgcccggctaattttttgtatttttagtagagacggggtttcgccatgttgcctagcctggtttcgaactcccgagctcaggcaatacgctcgcctcggcctccgaaagtgctgggattacagacgtgagccaccgtgcctggctgtctttatttttttatttgtttactaaacaaaacatcttaccctttatagcagagtgccctgtgaaatacaaattgtctttttctttttgtttttttttgagacagagtctcgctctatcgcccagactggagcgcagtggcacgatctcggctcactgcaagctccacctcccgggttcatgccattctcctgcctcagcctcccgagtagctgggactacaggcatgcactactatgcccggcttatttttgcatttgtagtagagacggggttccgccatgttggccagaatggtctcaatctcttgacattgtgatccgcccgccttggcctcccaaagtgttgggattacaggcgtgagccactgtgcccggccaattctatttaattattttaatttctttgctgaatttatctgatagaattctgaattttttctccgtgtttgtcttgaatttctttgaatttcctcaaaatagctatcttgaattatctgtctgaaaggtcacgtatctctgtttctccaggattcgtctttggtgctttatttagtttgtttggtgaggtcacgttttcctggatggtgttgatgcttgtagatattcgtcagtgtctgggcattaaacagttaggtgtttattgtggtcttcacagtctgggctcatttgtacctgtccttcttaggaagagtttccaggtatttgaaaggacccgggtgttgtgatctaagctgaatctactttagcgggaaccccacactcagtaatgctgtgactcttgcagactcagagagctgtaccacctttgtggtcttgaataagatctgaaagatttcccttgattaacataacaggtagagactcttgttgggtcttccctcactttgtcccagcatgtctctgtcagtgctgaagtgcctgaaactgggggttgggacagaagcacccctttagctaccaccactgggactgtgctgggtgagagctgaagccagcacagcactgggtttcacccaaggctcctgtgaccactacatggctatcgcctgtgttccctcaaggccctagccctgtacagtcagcaggtggcaaagccagacaggcttatgtccttctccttaggacggtgagttccccaggcctcaggttggtatacagatgccatccatgagccagggattggagtaaaaatccttagaaatctacctggtgttcctttgcactgcagctgagctggcactcaaactacaagctagagcccttcccactcttccatcccctttccacaggcagagcagcctcactctgtggccaccaccagcacgggcccacagggagtgctgtcagactaccactgaggttccattaagggctaagagctcttcagtcagcttgtggtgaatgttgcctggtctgaggctgactcttcaagactcacccagggcaggtccagcaatgtcatccacgagccaaggcctggaatcagggaccccaagaggcttcttggtgctctatccctctgtggttgagctggcagctgaggtgcaagacaaggtcccctttactttttcctctgttattctcaagcaggtggggtctctgaccgtaaccaccacagctggcagtgtgctgtgttacatctgaagctggcatgtctcagagtctcacccagtgccatcgcatactacctgggtactgctgctagttattcagggtccaagggttgtttagtcagaaggtgatgggtcctcccatgactgaattcttcccttcaaggcagcaggttctgttttggtccagagtgtgtctagaaatattatctgggtgggcctggaatgggtcctcacaaccctgcccagtgccctatcctgtggctgaggtgacatccaaaatgcaagacaaagttctttttgctgttccctctcctctcctcgagtggaaggaaggagccacgtagcctggggttgcatgaggggtggcacaagcacacccttagctacctcaactggtgtctcagtaggttgtgctcccccaacccaaccaggtcccctggctcggagcccagctcagcacagcacatgcctaggggttgcagtccttgtggcctcgaccgcctttcaagtttatttaggacttcagagccctccagcccacagtggcaaggcttgccagatctcaagtcctgaccattggggtgggcgattcccctctggctgggctggtcgctatgcttactccctgggtaggcgtccgttgagttcagcccagttttgctttctgctatgacagggaagcactgagttctgtgcaacgtctgacagtcactgcgctttcccttcccaggagcacagattctccacaacaggcaggcactgctgggggatggggaggagtggcattggcaactcaagactctacagccccttttagtgccatttccagtaatacaaaattaaatccaggtactgtgagtgctcatttgatttttggttcttacaaaggtgatttttttctgtgttgatagtgtttaaatttggtgttctgggccgggtgtggtggctcacgcctgtaatcccagcactttgggaggctgaggcaggcggatcaactgaagtcaggaatttgagaccagcctggccaacatggcaaaaccgtgtctctactaaaaatacaaaaattagtcgagtgtggtggcaggtgcctgtaatcccagctacttgggaggctgaggcagggagaattagggagaattgcttgaaccccggaggcagaggttgcagtgagccaaggtagcactactggactccagccctggtgacagagcgagactctctcttaaaaaaaaaaaagaaaaaaaaaaggtgttctgttaagggtatgatgggtgcagctttctattccaccatcctgctctgttgcacctctcgagctcagtcctttcaaccggaaacactagagaaaccctaaagcctaggccctaagtccataacgcaggtggtatggaggtattcccatttcagtgaaactgtgtaaacacttagaaggtcagccttggatttggtagcagtatgtgaaatgctcagagataaaactgatcagagtggggaggtgatgttacttctctgcctggctccacattggagaaaggaacatggggttaagggaggaggaaggaagacagcgttgaggctcattctgtcatccaggtgaggtttaatggatgattgttggccaaggagatgtcgctagaattgtgatttacatttggtaaaggagcagctagattttctaatgcggtcggtaaggacatgcaagagggtttcaggtatgacgctgggggttttttgtttttgctttttttttttttttaggtggagtcttgttctgtcaccaggctggagtgcagtagcatgatctctgctcactgcaacctctgcctcccaggttcaagcaattctcctgcctcagcctcctgagtagctgggaccacaggaggcacacggcatcacgcccggctaatttttgtaattttagtagagacagagtttttcaccgtattggtcaggctggtcttgaactcctgacctcaggtgatccacccacctcagccttccaaagtgctgggattacagactcgagccaccgtgcctggcaaccctaggggttttggccttagcagcagcagtgatagaagctgtatcagctgagatgagcaagttgggagtaggcataatacagtcactgggaatataaggagggttgttttcaccatgctcagaccctgagatgcttgtccacataggtcgggatatctgggaaggaattgatattggagacatccagtatatgatagctaatgtgtggactaaggtgcgttagccatgggtcccattttggagggcacacttcataataaggtagtaaatcttttagggaaccagaaaggactgattggaggctgaggactagatgttttgcctgggtccctggcggacattattggcattcataacctgtgttatgcattcacacaggagagggaggtaagtgacaatgaatgtagggtgtatcagagggcatagcttgtcgtggggcagacttccatggagataatagagatgagatgcaggcagaagtacagaagtaattgagggaaaggtcatcattgctgaggggctggcaagtgtagcacagaagtagaatagggtcatggatagctgaagccacacatggttctgtgtttctgtggagccatgcaaggaggtcctcacagaattacttgagaccaccgctccttttaggatccaatagaattgcaattctgtggtaatattggatcggtttgaatgggccatacactctggatggtgtcagctacgatgtagtgtaaggccaaaaattaaggcccagtgtgatttgccacctggatgcctggtcatattggtatgaccacaaatggctgagtgcaagtttctttcccatttaactctctttttatatatttaaaattttttctctcgtgtatgtatgtagaaacatggtcttgccttgtcgtccaggctgttcttgaactcctacgatcaagcagtgcttccacttcgacctctcagagtgctgggattacaggtgtgagacaccatgactggccacttcactctcttaagtaatatatctgaacgggtgcagtgcctcatgcctataatcctagcactttaggaggccgagatgggtggatcatttgacatcaggagtttgaaaccagcctgcccaatatggtgaaagaccatctctactaaaaatacaaaaattaaccaggcatggtggtacactcatgtaatcccagctactgaggagctgaggcaagagaattgcttgaacccaggaggcggaggttgcagtgagctgagattgcaccaccccgctccagcctgggtgacagtgagactccgtcataaaaaaaaaaaaaaaaaaaaaggaatgtatcctagcctctgaagcctttcgatcaatgaatgggaccaggcagagttcctgttatagtttgtagtgagtttcaattccatttttatctccagagttattcaaataagtcaatggcatcctcctgagggaatcaggccattacactctcttcatcttacaaagcttgcatgccatggccgtggttgctctcttttatccacaatccaacccccatgtggctctttgtggtgagtggtgtccctcttatcaggctgttaatatatgtgataccttttttttttttgaggcacaattttgcttttgttgcccaggctggagtgcaatggcgcgatcttgactcactgcaaccttcgcctccctggttcaagtgattctcctgcctcaacctcctgagtagctgggatcacaggtgcccaccaccacgctcagctagttttttttttgttttgttttttttttttggtttggttttgtttgagatggagtctcgctctgtagcccaggctggagtgcagtggtgctatttcggctcactgcaagctccgcctcccaggttcacgccattctcctgcctcagcctcccaagtatctgggactacaggtgcccgccacaacacccagctaattttttgtatttttagtagagacggggtttcaccgtgttaggcaggatggtctcgatctcctgacctcgtcatctgcccgtctcagcctcccaaagtgctgggattacaggcatgagccacgcccccggcctagtttttttgtatttttagtagagacgcagtttcactatattggccaggctggtctcaaactcctgacctcaggcgatccacccggctcagcctcctaaagcactggtactacaggtgcgagccaccacgcctggctcaatacatttgatttggaaactgctcttgacgacatctgtagaatatcagatgtcatttgttttaccaaaaatgtaaccctagggggagatttcaacccacactagtagaagacaaaggaggaaattaagatactttaagttggctggacacagtgcctcatgcctgtagtcccagcactttgggaagctgaggtgggtggatcacaaagtcaggagttcgagaccagcctggccaacatggtgaaatcctatctctactaaaaatacataaattagccaggtgtggtggtgcacacctgtaatcccagctgttcaggaggctgaggcaggagaatcctcaggagaacccaggaggcagaggttgcagtgagtctagatcgtgtcattgcactccgtctcaaaaaaaaataaaaaaaaaaagatactttaaattgtggccgggcacagtggctcaagcctgtaatcccagtactttgggaggccgaggcagatggatcatgaggttaagagatcaagaccatcctggccaacatgatgaaaccccgtctctactaaaaatataaaaattagccagatgtggtggcgggtgcctgtagccccagctacttaggaggctgaggcagaagaattgctggaacccaggaggcagaggttgcagtgagccgagattgtgccactgcactccagcctggcagcagagggagactccatctcaaacaaacaaacaaacaaaaaaagatactttaagttgtttaaaggccagagagaggccagtggtgtgtggcagtcagctggggatggacatggaatgtacctggaagtctaaagaatgaggtgcgttcagagagggtatctctgctgtgctgaaggtgccacattgggcttcccatgacctcggccatactagggaaagtgcctgtcaggagtgggtggactttatgtcacagccactgcacagatacctatttgttcaactaactattgttggtggctgtaccccatgaccagtgggcctagtttctcctatgtttgaggaccttgagaggaggatgtgcgagagtagatgtgtgggagagatggattgtgatacctcagcataggggtggtttgtggtttcatctgtcaacatcataacagggcacagtgacttttgaagacgtggctgtgaaatttacccaggaggaatggaatctccttagtgaggctcagagatgcctgtaccgtgatgtgactctggagaacctggcacttatgtcctccctgggtaagttgctcacactcaccctgtgacttgagctagtctctgttttcccctgtctttccccattggcaagactttctcatgtcaggagcatggacacagcttcctgcttcagttctatgggtaggttcttggttgtaggactgaggtgtacatactgccctactcctttcttggagcagccccagcacctgctttactgcaggctcccagggagggattcccagtcagaagcccaccttgttagtcctgtggatgtttgggtgtccttgtccagatttcaggttcctgtgtacccacagtctacttcctttctctagctgctattttcttatgccttcctgtggcaggaattgccttcacagactacatcactgcctatatagaccagaggctgttcttgcaagatcttctttagaaattctccttcaaatactcagtttttttctctcatgggctgagttgttctgagacaatgttggctgttcccttgttctgtctttcccttagtctgtgcatcattcatgtcccatgtatttggtcatcattgtggtgggaggcacagtcctccatttgatccagaagatgcaaatgaattcagcctcagcataataggctcagaaggagtgagtccctaaagagtggcaccctgggctggggatggtggctcgctcctgtaatcccagcactttgggaggccctggcaggtggatcataaggtcaggagttcaagaccagcctggccaagatggtgaaaccctgtctctactaaatataaaaaaatcactcgagcatgatggcatgtgcctgtagtcccagcgactcaggaggctgaggcagagaactgcttgaacccaggaggcagaggtggtgagcccagatcacgccactgcactccagcctgggcaacagagcgagactctgtctccaaaaaaaaaaaaaaaaaaaaaaaaaaaaaaaaaaaaagcagcaccctggaggaggtcatggagtcagggctttattgaaagcataccaggaacctattctactttagtagcatttttgtggcaagagaagtaggcacacataatttgtcttttcttcctcattcttgagaacatcacacttgtcacttgtctatcttatcatttctactcctttttttaagctttgacctacttgtacatgaactcgtaccctaatatccattctcctatctaatcttcacatctctggaccccaaatctcatccattttacatatgtcaccatttgcgtgttctccagtatttgcatagagatttgtgttagcaagtatatacgctttgttacaaactgtcctcaagcagaagctgctgtgttgtgcttgtgttttccttggcctggacaaatccctctctacagcactcacatgtcatgaggacataaattctgcagatgagtggtttgcagatgcagggattgtagaccctgcctctactccctgtgttacatacatggttgtgtcctttaacttatgaggcctcctacattctgtgaccgttatagtccagtaataatacatagcaccatcttccatctgaagccaacatcctgttcctccaagtagttccttggagtaattcctcagtttttcacatacacttgtgggtggtctgtgccttcccaccagagttaacatgcacttcaccagcattttcttgctttcaggttgttggtgtggagtggaagatgaggcggcaccttctaagcagagtatttatatacaaagagagactcaggtcaggactcctgtgacaggtgtgtctcccaagaaggcccacccctgtgagatgtgtggcccgatcttgggagacattttgcatgtggcagatcatcagggaacacatcacaagcagaaactgcacaggtgtgaggcctgggggaataaattgtatgacagtggaaactttcatcagcaccagaatgagcacattggagagaaaccctacagagggagtgttgaggaggcgttgtttgtgaagaggtgtaagttgcatgtgtcaggggagtcatctgtcttcagtgagagtgggaaggactttttgcccaggtcaggattactccagcaggaggccagtcacactggggagaagtcaaacagcaaaactgagtgtgtgtctccctttcagtgtgggggagctcactatagccatggagattccatgaaacattttagcaccaaacatatactcagtcagcaccagagacttctccctcgagaagaatgttatgtgtgctgtgaatgtgggaaatcctttagcaaatatgttagcttcagtaatcatcagagagttcacagtggaaaaagaccttatgaatgtggagaatgtgagaaatcttttagtcaaaagagcagcctcattcaacatcagcaatttcacactggaggaaaaccttatgggtgtgaagaatgtgggaaatattttagcttagaaggatatcttaggcgccatcaaaaagttcacgctggaaaagggccttatgagtgtggagaatgtgggaaatcttttagttcaaacgtgaaccttaagagtcatcagcgcattcacactggagagagaccttacaagtgtggagaatgtgagaaatcttttagtcggaagcccagccttagttaccatcagcgcattcacactgaagtaagaccttacaagtgtggagaatgtgggaaatcttatatttcaaaggggcaccttaggatccatcagcgcatgcacactggagaaagaccttacaagtgtggagactgtgggaaatcttttaatgaaaaaggacaccttaggagtcatcagcgagttcacactacagaaagaccttataagtgtggggaatgtgggaaatgttttagtcacaagggtaacctcattctacaccagcatggccatactagaaaaaggccttatatgtgttgggaatgtggaaaattatttaagaagaagtctcacctccttgtacaccagagaattcacagtggagagaagccatatgcttgtgaggcttgtcagaaattttttaggcacaagtgccacctcactgcacaccagagagttcacactggagaaaggccatatgaatgcagtgattgtgggaagtcatttacccacagctgtgcattcattgttcataagagagttcacactggtcagaagccttatgagtgcagtgaatgtgggaaatcttttgctgcaagctcctatctcactagtcacaggagagttcacactggtcagaagccttatgagtgcagtgaatgtgggaaatcttttgctggaatctccagtctcactaatcacaggagagttcacactggagaaaagccttatgggtgtagtgaatgtgaaaaaaaatttaggaaaagctcttcacttcgttaccatcagagagttcatgaaagaaaggccttatgagtgcagagaatgagtccagtctcattaaatacaggagagcacacacctgagtaagatcttgtgattgcagcaaatgtggaaaatgtttacccaaaagaagtctgctctccttggacattggagagttcacaccagagaaaagtccttacaagtaaaataaatttggcagttttgtagccacacctctgtattccttcaggattatatttaacactgaatgaaggccttactagtgtggcaaatataggctatttatccagaagtctggcttcaaaactcacaggagagctgtcactacggaaatgccttttgaatgtaatgtttgcaaaaaagcactgtgccttctgtcattgaatcctagaacactgagatgagaaaaacactgtagatgtataggttagatatatagggaatgttattattttttcctttttttggagagacggtctcactccatcacccatgctggtgtgcagtgctgcgatcgtagctcactgcatcctccgccccctaggctcaagtgatcttcccaccttagcctccatgtagctgggtccacaggcatgcaccaccatgcctggctattttctcatattagtagatatagggttttaccatgtttccaggctggtatcgaactcctgagctcaagcaatctgtacacctcagcctcccaaagtgctgagattgtaggtttgagtcactgtgctcagccaattatgtttttctgtgtaacatgggaggagatcctttgagggcaccatgtgcccaaattgaaaaaactccaggcatgtggcatctgtattatattttttactatgccctgttatcttgctagacttatgtgactgccacttatctggcaaaagccattacatctcagctacttggtaggtacccacattgcatcattcacctatttcgtattctagaagtatattttggttgtctcccattcacgagagattttttttttaagttttttgtttggttggttggttggttggttggttgtttttttttgttttttttttttttttttttggagacaaagtttcactgtcaccgatactggagtgcagtggtgtgatcctggttcattgcaacctctgcctcctgagttcaagcaattctcctttctcagcctcctgagtagctgggattacaggtgcctgccaccacacccaggtaatttttgtacttttagtagagatggggtttcactatgttggtcaaactgatcttgaactcctaacctcgtgatccacctgccttggcctcccaaagtgctgggattacagtgtgagcctctgcttctggcctttttaaaaattttttaaatttatattttttgtagagacagggtcttgctgtgttgcacagtctggtctcaaactgctggtctcgagtgatccttctgcctggcttcccagaatgttgggattataggcgtggcataagtcaccatgctgggacttttttatttctttaatttttaattccagatctggtcacagaaggatttgttgagtagcctcagcacttcttgctttttcatttctttctgataagttacaccatggaccttccccatttttgtcccagaggactcttgtgctgacttgaaaagatggactattttggctaagcatggtggctcatgcctgtaatcccaacactttgggaggccgaggtgggtggatcacaaggacaggaaggagttcaagaccagcctgggcaatatagtgaaatcctgtctcttctaaaaatataaaaattagccgggcatggtggcgcacctgtagccgcagctactcaggaggctgaggcaggaaaattgcttgaaccccgggaggtagaggttgcagtgagctgagatcatgccactgcactccagcctgggtcctgctaccttgaaggacagcatagctaaactgcgtggcccaagggacagcatgaatgcagaatatagctttcttcacttgtggcctatttgcatagctgcccaaggcctccagtggacgacttcatggctttgtggtcttcatctgtagcatggatactacagattgtgggttcataggtcagctgggtacagggcagtttttataacaacctctggtgggttttttattttagtgtcaatatcacactgaaagattggtgattttttttgaaccagacaaaattctctcttatgaggtatattgcactgtgctcggtactgttgagggaactctgttcagcagatcttacaaggcacacatgtgccatgatatccagaattctgtaaggcaacatcacaggttgtaaggctataggatgaaattataattttatggttacttagttactgcatttatagtcagcagaggggacagcaataaagtttttgaaatatatcttttttttttttttgagacacagtctcactctgtcacccaggctagagtgctgttgcaccatctcggctcactgcaacctgtgccttctgggttcaagcgattctcccacctcagtcacccaagtagctagaattacaggtgcatgccaccacaccactaatgttttgtggttttagtagagacgggtttcaccgtgttgcacagactggtcttgaattcaactcttgagctcaggtgatctgctcacctccgccttccaaagtgctgggactacaggtgtgggccgctgtgtttggctgaaatgtatgtcttttaaaggagtgtccacagttatccagtcactgtgtctgtgatggataagcagatacagaaattctcaagacttccataataatgaatgttgtgtagctaagctttggtcagaggaaataatctaaaggttttgtgaattcatgtaaccttttgggctgctcaccttaaggtaactcctgtattaacaggaggaacagaatagggaaaaagatctcagttcagtgatgtagctttgtgaccagccagtgatccagttcaatcaggtagaaatgaccttcctgctacatcaatatttgcttctatggaggctagtttccccacttagggcatgagaagaattggtaaagtcaacataaaattgccaaacctgtcaccaaaaatgatggcaaatctgtatttttctcttaaaccgtgttataaaagctgtaataaggtataggctgagcatcatggctcatgcctgtattcccagcactttgggaggccagattccttgagaccagtgtggggaacatggcaaaaccttgtctctaggaaaaatagccaggtatggtggcatgtaccttagtcttagtgatgtgggaggattgcttgagcctgggaggcagaagttgcagtgagctaagattgcaacgctgcagtccagcctgggtgatagagtgagaccccatcttaaaaataaaataaagatataaatgacatccaataaagtacacatatttgagctgtaggataagtcttgaattttattataatcccgtgaaaccatcatcagagtcaccataatgaatttatctaatctatcacctttgtatttacttggagcctttataaagtttttctctctgctcttcaaacaaccattgatttactttgctgtatgatggagtactttccattttctggaattttctgactgatgtaataaagtgtttcctcttataatccctgggtgctctcctgcatcatgcttattttgatgtcattgtagatatatgagttgttcattcgttttatgttgctgagaagtatagtctgccgtgaaatgtcattgtatattcattcattcatccatccatttatggatattttagttgctgcatactttttttttttttttttttcaagactctctaccaggttggagtgcagtggtgtgattttggctcattgcaacctccacctcccaggttcaagtgagtctcccacctcagcctcccacgtagctgggattacatgcgtaagccatcatgcccagctgttttttgtatttttagtagagatggggtttcactgtgttaccgggttcatctcaaactctgggcctcaagtgatctgcctgcattggcctacaaaagtgctcagattacaggcctgagccatgagccaccgcacctgtaattgattctgaggccaggcacgatggctcacgcctataatcccagcactttgggaagcgcaggtgggtggatcacttgaggtcaggagtttgagaccaggctggccaacatggtgaatccccatctgtactaaaaatacagaaattagccaggcatggtggcgcatgcctgtaatcccagctactcactcaggaggctgaggcaggagaatcacttgaacccaggaggcagaggttacagtgagctgagatcacaccactgcactccagcctgcgcaacagagtgagactctgtttcaaaaaagaaaaaaaaaaatttattctgagataatcccagttcccagtgtgaaactattcctgcagtcactggaaaataataaccactttcttgtaaggagatgaaattttggagctcagatgccgtgtttatattgttattcagatggcctttttaacctgtgctttaatggtgaaagttgtagcgactgatgtgtgtaccacaatggcattggctaagttgctcgtcctttgagatagatgtcaatgtgattaaagaaattgagtacaccttagcatatgaattaagaaacatattgacatagtgatcctcatagtgacatagatcagcaggacttgtgttctgagcactggtcatgaccctgctcatgatgaaacaggatctggtcaaaacaggatgcactaaagaaaccagctgaaagcagtaaaactaagatggcaagaatatgaactctagttaccctcattgcctcactgctcattatatgctcattataatgtattagcatgctaaaagacactcccaccagcaccatggccgtttacaaatgctatggcaatgcccagaagctacctcatgtagtttaaaagagaaggaacccctggttctgggaactccccactctttttctagaaaattcatgaataacccacctcttatttagcacataattaaggagtagctataaatatagctagccaacaatccacgggtgctactttgcctgtggagtagccctgctctgtctgtggagcagccattttcctgttctcttgctctcataaacttgctttgccttcactttacactcttggcttgctcttgaattatttcctttatgaagccaggaaccctcctggattgagccccaattttgggatttgctagcatcactagagcaattttctgtgggaaccagtggccaactgccagcttcactacctgcttcagggtgtaccaacatccgtctatttccctgtcattagatctttattattattttatttttttgagacggagtctagctctgtcgccaggctggagtgcagtcatgcgatctcagctcattgcaacctctgcctccagagttcaggcgattctcctgcctcagcctcccgagtagctgggactacaggtgtctgccaccatgcccagcaatttttttaacatgggttttgctgtgttagccaggatggtcttgatctcctgacttcatgatctgtccacctcggcctcccaaagtgctgggattacaggcgtgagcaaccgtgcccggctaatttttttatttttattagagatggggtttcaccatattggtcaggctggtctcgaactcctgacctcatgatccacctgactcagcctcccaaagtgttgggattataggcatgagccactgcacccagcaatttatttattttttattttttattttttttgagacagagtctcactcctgttgcccaggctggagtgcaatggcatgatctcgactcatcgcaacctccacctccagggttcaagtaattctcctacctcagcctcccgagtagctggaattggaggcatgcagcaccatgcctggaaaattttgtactttcagtagagacacggtttctccatgttggccaggctggtctcgaactcccgacctcaggtgatccacctgccttggcctcccaaagtgctgggattacaggtgtgagccaccatgtctggcctttatttttattttttgtgggtatatagtagtgtatatatttgtagattacattagatattttgatgtagccatgccatatgtgataatcacatagggtaaatggggtctcagtcacctcaacatttatcctctgtattataaacagtccagttatactcttttagttatttttaaatatataattaaattattttgactatagccaccctgttatggtagcaaatattaggtcttattcatttttgctcactgttttttgtacccatcctgtcatcatgtcttatggagaattttcttttgttcccaacaaaacaatgaaactcgcaaaactgactgtaatgattcagtctacgtgaatttaaagagcaatcaatacttaatgttctcagctctgagtgcacacattgtaagtctgaatgatgccaatgatatggccacttagataagtaaagtttgggagcatctcaaatagtatttttattctctgggtgcaggatgagcttcctagagtctgatgtgatacctatttgatgcttttacaaagaatcaataatcttcctcctttgaggtgtgagcagggctttccagcagccctcagaatgtaacatggtctgcattcggtttgctcttggaggataccaccattgttggctgagagctctgggaagtactttacccagaaggcgctagttgcaaggcccaggatgagggatttctgggcatgcttgtcaggccagggagtactgggttgggactgagaaggcacaagaggagtagtcatctctgctcccaagtggcaggtctgaggctcataggcactggctggggtgatgcctgctccacccacagttgatggcagcagccacactgagggacctagctcaggtaaatgctgtgtattacaggcttcaccccagctagagtaatacaggtagaggaaccaataggtacaaaggcttggaggtgcatctgagccatgaacatttcagaacctggtaaccatgttgtgtcatggaaagtggggaactacattacccagaaagctctgctttaaacgacagccggtcagagccagtgagcactcggaaagaaggcatttccacgtgtgcacgtaacgtaaggccgagacttccggggtctctagtagcggctgtgtatcggcgatgcgggtgtttccccagtttgtggcccctgagtgctgggtgggaccgcggtgactgaacctagaaggtggagaggaatcgtcctcggtgcccagaggcggctctgcagccccgtgacggcgaccactgctcccgggccgtgcttccccaagtagtccgatggcagcggctgtgccgaggcgcccaactcaggtaattgtggtgccttctgtgccctcaggtcaccccatcgtcacccaggtcctaaaccagcgagggagcggctcctgctcgtgggtctgtagccggtacccggcgtaggaacactgaggcgctcacaggaggcctctccttgtaaccgtccagtgggttcacgttgccagctgcctagacagagccgatttatgaagactggggaattgcgatggagaaatagtaattcacgcagagccgtcctgctgttcgggagacaggagttttattattcaaatcagtctccctgagcattctgggatcagagttttcaaaatttggcgggtaggggcttgggaagtggggagtgctgatcagtctggttggagatggattcatagggggttaaagtgagtttttcatgctgttttctgttctgggtgggatggcagaactgattgacccagattaccggtctgtgtgttgtccgctgatccatccagtgcaggatctgcaaaatgccccaagcactgatcttagatattggggaaaccagccccacaccacccagcagataccccgagtcctgcggagacaaaggagttagaaagagacagaatacgcatttaaaaggcgggtccaggtggccagagcattggaggcttcctggcggcccagagctcttgggctccacccagtttattggtttacaagctctttgttcttatggctgattggagggggaggaagcgatcaggaaaaggattaatcagtaaaggagaactcgtgagtcattccataagatgtaaagcactggccgtttctgtgaatttccttgaacaaaggcgtgtgtctaaactacttaagatctttaacttaactgaaacgggtggctgcgggtttcaggaggagccaagatgtttgattatgctccactgcttcaagggagtgtgatctccctgagcaacccatggaatgctgctgaagagttatgctctcggggcataaagacatgaaggcaataaggagacttttctcctcagaggccgcccatggcttcccatgggtgtctcacacaggggagaccaactcaactagcaccccagaaactcacattaggttttacaatagtaaggttatcttcaggagcaacttggggaggttcagactcttggagccagaagctgcatgacccctaaaccgtaatttctattcttgtagctaatttgttagtcctgcaaagacaggctggtccccaggcaagaaaggggtcttttcaggaaagggctattatcaattttgtttcagagtgaaaccatgaactgaattcttttccaaagttaattcagcctatgcccaggaatgaaaaaagacggctgaaaggttggaagcaagatggagtcggttaggtctgatttctttcactgtcataatttcgtcagttataattttgcaaagtcggtttcacctgtttctgacaccagtgggatgcagtggggagagtgacaggcacaggtaggggtgcaggcaatggcctgcagatggacagagctggaaggatggaacctggggttcacaggcatctgtcaggaacaacgtgtgagatggagctcttcctggtagagcaagcaggccaggggctgtgcattcatcatgaggattctagaagccatggagagttttgaagaaaggagggacatgatccaaatccaggcttttaagaagtttcccaaaggccaatcaaaggaagaacatcatagagagagaggatgaggactttggggccttgggaggttgaatccgttttgtagatcacatagatggtagagatgacattttgcactgagaaaagcaggtcagacaaccagccttagggttacctggttccagggacaagaaagggttcagggagtcctgagcttatcaaatcctgtgacatgtttgtaatgtctgcctttcccctcaggcactcctggctgcagaagcacttagggaacccacacagggaagtggagggtgttccattccctcattggtcctgacgccatctacaggttctctagcttgtggtgtcctgggactcttaagtgccatttttttcagtcctttgatccgaggaccctggagaatctctgaagccaggataccaagtccatgacaggttatatggaggtattcccatttctgtcaaccaatgtaaacacccttgtaagattaacccaggatttgctaccaggttgtgaaatgcttagagataaaacggatcaaagtcaggaggtgatattaccacagttctacctggctacaggcttcatctggctggaccttgttgcatagactgtgggttgagggaagaggaagaaaggtcagagataaggctcctgccataatccaggtgagggttaatggatcagataagtggtaaatcacatgggtctggattcaggattcactttttgtaaagagacagctaggttttcttttttttttcttaacgtggaatttcagtcttgttgcccaggctggagtgcaatggcgcaatcttgggctcactggagcctctgcctcccaggttcaagcaattctcctgcctcagcattcaaggtagctggcattacaggcacccaccatcatgcccagctaatttttgtatttttagtagagacgaggttttaccatgttggccaggctggtctcgaactcctgacctcaagtgatcgtcacatctcggcctcccaaagtgctgggattataggcatggaccaatgcgcccagccgagacagctaggcttttttttttttttttttttttttttttttgagacggagtttcactctcttgtccagcctggagtctagtggcacaatctcagcccactgcaaccttcacctcctgggctcaagtgattctcctgcctcagcctcctgagtagctgggattacaggcatgtaccaccacactcggctaatttttctatttttagtaaagtcggggtttcaccatgttggccaggctagtctcaaactcctgacctcaggagattcgctggcctctgcctccccaagtgctgggattataggcacgagccaccatgccttgcagacagctagattttctaatgtggatgataggagcatgaaagaggaatcgggcatgagcccaaggtttttgatcttagcagctgtaaccatgcacactgcttcagctgagatgacgttggtattgacataatattcactgtggatatccagagggttgttttggccatatgaagaatcagagaccaataagtggtggcatcaaatcgataactagacatactggatggggtatctgggagggtgttgatactggagacatccaatatatgaaagctaatgagtgaactatgattagttatgggtccatttaggaggacatgcttcagattatggtggtaaatcttttcagggggcagaaaggtgtgattacaggctgaggactggatctcttacttacgtcctcaattgatgttattgggcttcctaaacacctgagagggtgtgagtgaccatcataacaggacatttaatacagtagagtttggaaggggacatagacatccaaagagataatagagaagagatagatgcatgcagaagcacaggagtaattcagggaagatgacacttaggcctgagttggtgccaaagttgtaacttttttgtttttttttttttttcagatggagtttcgctcttgttgcccaagctggagtgcaatggtgccatctcggctcactgcaacctccacctcctgggttcaagcaattctcctgcctcagcctcccaagtagctagtattacaggcacctgccaccacagcaggctaatttttgtattttcggtagagacagggtttcaccatgctgaccaggctagtcttgaactcctgaccgggtgatctgcctgcctcggcctcaaagtgctggaattgcaggcgtgagccactgtgcctggccagttgtaactatttatcactgtctggactcataaacattttgagatgactttgggagtgcctggggagtttcattcagcctggtgcatatgggcagtgaaaaatatgctcatctgtgatagtagatgtggtttggttcacaaatccaggggctgggctttaaacggcattaggtggacagaggagggttgctacagctgaggtctcagctggtgcagcacaaaagtgaaatagggccatggctatctgaagccatatgtggttctgtgtggctatggagtcattccaggagacgttcacaggatgatttgggattaccactgctattgtaaaccatggaaattctgtgttaatattggatgctatttgtatttgtcaagcatagtctggatgcttatccacattttggtataaggccagaattgaaggcccaatatgatgtgtcactttgacatcttgtgaaagtgggacaaccttaaaaggtgtgagtacaaatctcattcccactctgctctcttgaataatgtatcctagcctaacagcccgttttatcaaggtgataaggcagggttccaggttgttatattttgtggtgggtttcaattccatccctaccagcagagttatggaaacaaaccattgcatattcccaagggaatcatgggccgttataccctcttcatcttgtgaaataattttatttgtaggcgctgggtgtggtggctcacccctataatctcctcactttcagaggccaaggctggtggatcacttgagaccagaaattcaagaccagcctggccaacatggtgaaaccccgtctctactaaaaaaaaaaaatacaggccaggcatggtggctcaagcctggaatcccagcactttgggatgctgaggtgggtggatcaggaagtatggagatcgagaccatcctggctaacacagtgaaaccccgtctctactaaaaaaaaaaaaatacaaaaaattagccagctgtggtggtgggcacctgtagtcccagctactcgggaggctgaggcaggagaatggcctgaacctgggaggcagagcttgcactgagctgagatcatgctactgccctccagcctgggggacacagcaagactccgtctcaaaaaaaaaaaattagccgagtgtagtggtacatggctgtaatcccagctacttgggaggctgaggcacaagaatcacttgaacctgggaggcggaggctgcagtgagccatgattgtgttcctgcactccagcctgggtggcagagctagactatgtctcaaaaaaatcccccaaaaataaacttttacttctggggatgccagagaggggctgaaggttggggaaactctggtgggggtggccatgggcatgtgtctgtacagtataaagaatgatatatatttaatgagagcgaggttgtctgatggactcaggcagctgccttgggctttacgtgaccttggatatcgctgttcagaagggggtgtgggctttttttgttttttttttttttgagatggtgtctcgctctgttggccagggtggagtgcagtggtgtgatctcggctcactacaaaccccgcctcctgggttcacgccattctccggcctcagcctcccgagtagctgggactacaggtgcccaccaccatgcccggctaattttttgtatttttagtagagacagggtttcaccatgttaaccagcatagtctctatcccctgactgcaagatctgcccgaatcagtgtcccaaagtgctgggattacaggcgtgagccaccgcacccagcccagaagggagtggacctttttatgtcaggacctcagcatggatacctatttgtccacctacttcttgttgctgatggcatttgaccagcaggcccatgaagagacaaaggcaccagtggatgtggtttcaactccgtgttggggaccttgggaggaggatgggcaagggtgggtgtgtgggagaggtgggttgtggtacctcagcagaggggctgcttgtggtttcatctgtcactatcatagcagggcactgtgacctttgaagatgtggctgtgaacttttcccaggaggagtggtgtcttcttagtgaggctcagaggtgcttgtaccgtgatgtgatgctagagaacctggctctcatatcctcgctgggtaagttgctcacgctcacctttgtgacctgagctagtgttactgttcccctgtttttcattgacaggactgtctttctcacctaaggagcctggacacaggttccttctgcacttctctgtgtaagttgtgtggttcgtaggagtaaggtgtgtgtattgccttttcctctcctgttttttttttttttctgagacagtgtctcgctctgtcacccaggctggagtacagcggcgccatctcggctcactgcaagctccacctcccgggttcatgccgttctcctgcctcagcctctcaagtagctgggactacaggcgactaccaccacgcctggctaattttttttgttttttagtagagacgaggtttcaccgtgttagccaggatggtcttgatctcctgacctcgtgatccacctgccttggcctcccaaagtgctgggattataggcgtgagccaccacgcccagccaccttttcctctccttaagcagctccaacacctgctttgctccaggctcccagggaaggagtcagagtcaggagtcttataggcaccttaatgtatccactttgcctgcctctggctgtcaggtgactgtccaaatcggtagctcttgtgtgcccaggttctattaacacttccttcctctatctgacaatgctttgtgcctccctgtgccaagaattgccttcattgacattgtcactacctacatagaccatagaccatagactcttcttgcaagaccctgcttaggaattcttttgtaatacttaccttactctcctgtgggctgtcaggtgcttagttgtcctgagctagtgttggctgttcatctctgctatctctcctttcatagttacatcgtcgggtcctatgtactgggtgtgagatggagagtcctccatgtttgacaagatgtggttcaattcaggctcatcacgataggctcaaagggagcctgtccctcaggagtgccatgctgggggagggcatgacttcaggggtttatccaaatcataccagaaaccatttacatttgccaagtatttttggggcaatatgagtaggcacacactatttgtctttttctccccattgttgagagtttcacatgtgttagttctgtaccttttcatttctgcagtgatatccaccccagcactaatactcacatttctggactccacatctcacccatttttcttttgctttcatctgcagttgtctctgatattggtgtattgattacgtattaggaagtgtatgcccatggttaaaccatctatgaccacccctgctgtgttgtactcatgttttcttggtcttcacatgtttctatatatatatagatgtatatatatgtgtgtatgtgtatatatatatatgtgtgtgtgtatatgtatatttttgagagagagttttgctcttgttgcccaagctggagtgcaatggtatgatctcggctcagtgtaacctctgcctcctgggttcaagcgattctcctgcctcagcctcccaagtagctgggattacaggcacatgccaccatgcctgactgactttttgtatttttagtagatacagggtttcactatattagccaggctggtctcgaactcctgacgtcaggtgatctgcccgcctcggccttgcaaagtgctgggattacaggagtgagccaccgtgcccggcccatattcttctatatagcactcacatgtcatcaggagataaggtcctgtacacaacttgtttgtagaggaaggagctgtagaccctgcctctactccctgtgttgcatatatgcttgtgctctttacatcatgaagcctcctggattctgtgacctttatagcccaggaattctaagaagccccatctttttttttttttttttttttgtgattgagtctcactctgttgtccaggctggggtgcagtggcgtaatcactgctcactacaaacctctgccttctgggttcaaatgattctcctgctttagcctcccgagtagctgggattacaggtgtccacaaccacatccagctaatttttgtatttttagtagagatggggtttcaccatgttgttcatgctggtcttgaacttctgacctcaggtgatccacccgcctcagcctcccaaagtgctgggattacaggtgtgagccaccatgcccagccagcagccccatcttcaacttgaagccaacattgtgttcctgcaaatatttctatagattaattcctcaatttgtgagacgtacttgtgggtgggctgtgccttcccgccggaggtactttgcacttgaccagcattttcttgctttcaggttgttggtgtggatcaaaagatgaggaggcaccttgtaagcagagaatttctgtacaaagagagtctcagagcaggactcctagggcaggtgtttctcctaagaaggctcacccctgtgaaatgtgtggcctcatcttggaggatgtttttcactttgctgaccaccaggaaactcatcacaagcagaagctgaacaggagtggagcatgtggaaaaaacttggatgacactgcataccttcatcagcaccagaagcagcatattggagagaaattctacagaaagagtgtcagagaagcatcgtttgtaaagaaacgtaagctcagggtgtcacaggagccatttgtcttccgcgagtttgggaaggacgttctgcccagttcaggattgtgccaagaagaagctgctgtagagaagacagacagtgaaactatgcatggcccaccctttcaggagggaaaaactaattacagttgtggaaaacgcacaaaagccttcagcaccaaacactcagttattccacaccagaaacttttcactagagatggatgttatgtgtgcagtgattgtggaaaatcctttagcagatatgtcagcttcagtaatcatcagcgagatcacactgcaaaaggaccttatgattgtggagagtgtgggaaatcttatagtcgaaagagcagccttattcaacatcagcgagtccacactggacagacagcttatccctgtgaggagtgcgggaaatcttttagtcagaagggcagccttattagccatcagcttgttcacactggagaagggccttatgagtgtagagaatgtgggaaatcttttggtcaaaagggtaacctcattcaacatcagcaaggtcacactggagagagagcttatcactgtggggaatgtgggaaatcttttcgtcagaagttctgctttattaaccatcagcgtgttcacactggagaaaggccttacaagtgtggagaatgtgggaaatcttttggtcaaaagggcaacctcgttcaccatcagcgaggtcatactggagaaaggccctatgagtgcaaggaatgtgggaaatcatttaggtacagatcccacctcactgaacaccagagacttcacactggggaaagaccttacaattgtagggaatgtgggaaattatttaacaggaagtatcatcttctggttcatgagagagttcacactggagaaaggccatatgcgtgtgaggtatgtgggaaattatttggcaataagcacagcgtgactatacatcagaggattcacactggagaaaggccgtatgaatgcagtgaatgtgggaaatcatttctttccagctctgcgcttcatgttcataaaagagttcattctggacaaaagccttataagtgcagtgaatgtggaaaatccttttctgaatgttccagtctcattaaacacaggagaattcacactggagaaaggccttatgaatgcaccaaatgtggaaaaacatttcagcgaagctctaccctccttcatcatcagagttcacacaggagaaaggccttatgagtgcagtgaatatgggaaatcgtttgctgaagcatcccgtctcgttaaacacaggagagttcatactggagaaaggccttatgagtgctgtcaatgtggaaaacatcagaatgtctgctgtcctcggtcttaagcgacttcgtgttgagatggagtcttgttctgtcacccaggctggagtgcagtggtgcagtcttggctcgctgcaacttgggcctcctgggttcatgcaatcctcctacctcagcctcctgagtagctgggattatgagtacacaccaccacgcccagctaatttttgtgtttttagtggagatggggttttaccatgttggccaggctggtctcaaactcctgacctcaagtgatccacccaccttgactcccaaagtgctgaaattacaggcatgagcctctgcacctggccttcattcttttcgtattgcttagaatatgacatgctgaaccaggcatggtggctcatgcttgtaaacctgatgctttgggaggacaaggtggttcattggaggccaggagttagagatcagcctgggcaacatagccagacctcctctctacaaaaagaaaaaagaatgacatgcttcttgtttttgtctgttataaatgaaactgctatatttgaatgcagttgttcatgtaggtatgtttcactatggtaatatggtggtgtgcagtgcctgagtcacgtgatagattaaagtacaactcttttttgagacagagtctcactctgtcacccaggcgggagttaggtggcatgatttcggctcactgcaacctctgcctcccaagttcaactgattcttctgcctcagcctcccgagtagcagggattaccggtgtgcaccaccatgcctggataacttttttttttatttctattagcaatggggtttcaccatgctggccaggcttgttatgaactgacctcaagtgatctgcctgcctcagcttctcaggtgtgacctactgtgcttggcctaatgtacaactttttaagcaatgccaaactatgacttaagaatgaaattattgctcatttgtatatctatctaccatcagtgtccaagaatttctgttctatcttaccaagagggagtatggttagtatttgaaattgtttattattttaataagtggttataacttttgagtcagtggtttatgttttgcattttttttgttttgagacaaagtctcgctctgtctcccaggctagagtaccgtggcacaatctcagctcattgcaacctctgcttcctgggctcaagcactctgcccacctcagcctccagagtagctggaaatacaggtatgcaccaccacaactggataacttttgtattttctgtagagagggttttacctttttgcccagtctgatcgcgaactcctgggctcaggcgatccacttgcctaggctccaaaagtgcttggtctacaggggtgaggcaccctgcctggcctcacctgtaggcttgttttttaaaatgaattttatctatttcccatttcattaatatatttaaaaataatgaaataacaaagacgtatgttggacttcattcattcttcagtgatgtcactttgctgcaaggaatatttggttttcttttttttttttttttccagatggagtctagctctgtctcctaagctacagtgaagtggcatgatctcggcccactgcaacctccacctcctgtgttcaagcgattctgcctcagcctcctgagtagctgggactacaggcatgtgccattatacctggctaattttatttatttattttagtagagatggggtttcaccatgttacccaggctgctctctaccttctgagctcaagtgatccacctgcctcggcctcccaaagtgctgggattacaggtgtcagccactgtacctggctgaatacttggttttcagtaccacaagaactatgagctggttatccacttcatgtggaatcataagcgtcccaaagtgacaatacatatagattgccaggcagtgaaacagttaagatgccaccatagctttcttttcaacatctttctaagattaccttactatttcttttgttccaagtttgtacttcctcacagttctcacatatggaaaggatacacactttgtagaaacaagaactttatgttatccaagttctaggatagccatgagctccaattatctcagagctctgagtcctctactcaatacccattgagatttatgtgttctgaggcttttgtcttctagctacttacttcattctccatgggtaacgtcattcatccacattaactaatttcctcactccaagctcttttctagagataatctccagtccctgtgcagaaactgtcattgcactttctgctgaaatggcagtttcttctcagcaaggtgagattatggaatccagaatcttttttcaggggtcacatgcccatttccccacttgcatgaatgtcgacactgcagccacagttttggccgtaaatgtgaatttggcaagtaaccactgttcccagggaaatgtcccaatcagaagaagattatctgggacactgatactgacagggagatgggacattctgagggacccggaggcagggtgccacctcctcaacttccctgagggctgcctagaatctgtttcctctcactctgaattattcttcctcttatggctgaccaaaaacatggaacctcacaaagtccactgtaacagctttatatttgtgaagtgaagaacatgaagacagtttcaagcaaagttattgagtggacactttgtgttttttttgagaagtctcactctttcacccaggctggagtgcagtggcacgatctcggctcactgcaactccacctcccgggttcacgccattctcttgcctcagcctcctgagtagctgggaccacaagcgcccaccacgtcagcttaatttttttgttttgtttcttgagacagagtcttgctctcttgcccaggttggagtgccgtgtcgcaatctcagctcactgcaacttctacctcctggattcaagcacttctccttgcctcagccacctctttagctgggattacaggtgcgtgccaccacacccagctaatttttgtatttttagcagagaccaggtttcaccatgttggtcaggctggtctcaaactcctgacctcgtgatccacccacctcggcctcccaaagtgctggaattacaggcgtgagccactgcacctggcctgtattcttttctttagtagagacggggttttactgtatttgccaggatggtctcgatctccagacctcgtgatccgcccgccttagcctcccaaagtgctgggattataggcgtgagccaacacgccctggccacttcttgtctttgcaacattttttagatatgtatttgtgttttttggggagcttaatttgctaatggaatctctgttattttcctaacatgcttggtggatacaagagttaagacttcctgtcccgtttagtgtaacaaaagaaagttaagaaatgtggataaaagattgtaagttagaaatggcaagataatcagctatatgaagaatcttggccaggtgtggtggctgaggcctgtaatcccaccactttgggaggctgaggtgggcggatcacaaggtcaggagttcaagaccaccctggccaatattgtgaattcctgtctctactaaaaatacaaaaattagtcgggcatggtggcgggtgcctgtagtcccagctactcgggaggctgaggccagaaaatcggttgaacctgggaggtggaaggtgcactgagccaatatcacaccagtgcactccaacctggtgacagagagacacatcatctcaaaaaaaaaaaaaaaactcaatccataaatgttatactttataactttataacagcatgttatatgggcttagatattatccctaaatttttttttttttttttttttttgagacagagtctcactctgtcacccaggctgaagtgcaatggcatggtctcggctcactgcaacctccgcctcccaggttcaagtgattctcttgcctcagcctcccgagtagctgggcctataggttccctccaccacgcccagctaatttttgtatttttagtagagatgggctttcactacgttagccaggctggtctcaaactcctgacctcatgatccacccccctcggcctcctaaagtgctgggattacaggcatctgccaccgcactcggcttatccctagaaatcctatgatagcatgatgtataggcacctaaaggcatggcacttgagaaatgtgaataagattgtaagttacaaatagcaaggtacagtcagatgttaacagtctcagcccctaaatgtcaccttgtattacagcatgttatataagcacatacaggcacatacatgaaatagtgatacttcattctcagtaatatcttcatccttctcactggaaagatctttgatgatttttaatcaacataggagtttcaatgatatctagaagtttaaaagggctcgttcaaacaaattatgaccacacacactgaagagtatgtttgtctcttgtggtgtaaatttttttttattacaccaaattatgttcacacaaaacctttgtaatcagggggaattaaagagccttcctggaaaatggaggttgcaatcagccgagatggtgccatcgcactctagcctggggaatagagtgagatcctgcctcaaaaaaaacaaaaaaattctttattttctccataaactacagtttatataagcaaaagtttcagtactaagcaattttagtctctgcagtctcttgtcttgaattaatacaacttttgttaattctcttatgaagttaatcttcctgcttgtatgtgaattaaatatatgtcaaactttttttgtacaaaagattcatacctctttcctgtttgaaattattttactgtgtttcatcaatctaatgtttatttttattacaccagtaatttcctcattgtgttgaatcttacagtggcttataaatctacatgtacctagaaatgtttagccagtccatgtatatttgatgtggcacattttttcctttgaatcacatactctaagagaagtaacttcctcttgctaacctctactttccctaagtgttgaattaatcctctttagatgattataattctcttttcaatagctagaaagaatctataaggaactttcctggctgggtgtggtggctcatgcctgtaatcccagcacttcaggaggccgaggtgggtggatcacgaggtcaggagttccagaccagcctgaccaacatggttaaaccatgtctttactaaaaatgcaaaaattagcacctgtaatcccagctactcaggaggctgaggcatagaattgcttgaacctggcaggcagaggttgcagtgagttaagatcgtggcactgcactacagcatgggcaacagagcaagactctgtctcaaaaaaaaaaaaaagaaatcacagtccatgtctgaggggtgtacattgcttatcaatttggagagaaaataatagataatgtaatacaatgttaaaatagattaaaaattgagatagaaaaactgctcaatttatgcttcacataaaattgaaaattaaatcaagcctacacataaaggcattttttatatatatacatatatgtgtgtgtgtgtgtatatgtacacacatatatacgtatatatgtgtgtacatatacacacacacacacatactttttatgttatttttggagagaatcttgctctgctgcccaggctggaatgcagtagcatgatcatggctcactgcagccttgaccacccccagggttcaagtgatcgtgccacctcagcctgctgggtagctgggactacagacaggcaccctgcctggctaatttttgcattttttgtggacacagggttttgccatgttgcccaggctggtctcaatctcctcggctcaagtcaacagcctgcctctgcctcccaatgtgttgggattacaggaataaactactatgcccaactcaagattattttttaaatggtttattttcttagtaaattggggtgcacaagtcattaaaagcaaggattaaatttaaagggaaaaatttgttttacttttctacagaaaattaaaaccaaagcacattaaaagtgacaacacggccgggcacagtgactcacacctgtaatcccagcactttgagaggatgaggtgggcggatcacaaggtcaggagatcgagaccatcctggctaacacagtgaaaccccatctctactaaaaataccgaaagttagccaggtgtggtggcacgcacctgttgtcccagctactcaggaggctgaggcaggagaatggcatgaacccaggaggcggagtttgcagtgagccaagatcaggccactgcactccagcctgggcgacagagcgagattctgtctcaaaaaacaaaaaagcaacaacccaagatggaaatgacaaaagttacttaaaatgtgcaacataaaaggtagtcatttaggctgggtgcagtggttcatgcctgtaatcccactttgggaggccaagacaggtgggtcacttgaggacaggagttcgagaccagtcaggccaataccgtgaaacagtctctactaaaaatccaaaaattagccggatgtggtatcatgcacctgtaatcccagatgttcgggaggctgaggcatgagaatcgcttgaatgcaggagcagaggttgcagtaagctgtgatcatgccattgccctccagcctaggcaacagagctagatccttgtcttaaaaaaaaaaaaaaggaaaggagtcatctataattttactacttatacagattacattgagataaatcgcaaaatattaggcaaaactttaaaacaatttttaactatccagtatatcaaagagagatgccacacattgtatttgtttgcaagaatgtcattgtgattacaaaactgaccactaaccattcagttgaagttgattgagaacttaaaactatttccgtctatggccataccaccctgaacgcgcctgatctcgtctgatctcggaagctaagcagggtcgggcctggttactacttggatgggagaacttaaaactatttccttttttttttttttttgagatggagcctcactttgtcgcccaggctggagtgcagtggcgtgatctcggctcactgcaacctccgtctcctgggttcaagtgattctcttgcctcagcctcccaagtagctgggattacaggtgtgtgccactaagcccagctcatttttgtatttttagtagagacagggtttcaccatgttggccagagccaccgcattatttttcagccaggtgcagtggctcacacctgtaaccccgcactttgggaggccaaggtgggtggatcacctgaagttgggagtttgagaccagcccgatcaactttgaagaaaccgtctctactaaaaatgcaaaaacctagccgggcgtggtggcacgtgcctgtaatcccagctactcgggaggctgaggcaagaggatggcttgaactcaggaggcagaggttgtggtgagccgagatcacagcactgcactccagcctgggtgacaagagcaagactccgtctcaaaataaataaataaaaataaaaaataaacatgatgatcacagatgcagtcacattttctgagttcttgtctctctgccagtgccacccagatagcctcacaaaactttgacccagccactgttagtgtcgccaccgcccataaaggagctgagcccagcaggggcactgcctggggccctgtagccaaaaggctacagcaggagctgatgaccctcatgatgcctggtgacaaaagaatttctgcctaccctgaaagccttatcaaatggacaccatccatgaagcagctggcacagtgtatgaagatctgaggtataagctcttgctggagttcctcaatgactacccacctttacgatgcacccacagtgaagttcctcacaccctgctaccaccctaacgtggacacccagggtaacatatgcctggacatcctgaaggagaagtggtctgccccgtatgatatcaggaccatcctgctctctatccagtgcctgctaggacaactcaacattgatagccctttgaacacacatgctaccaagctctgggaaaaccccatagctttaagaagtacctgcaagggtcaggcgcagtggctcacacctgtaatcccagcactttgggaggccgaggtgggtggatggatcacctgacgtagagagtccaaggcctgacaaacatggagaaatgtcatccctatttaaaaaaataaaaaaattagccaagtgtggtggcgcatgcctgtaatcccagctactcgggaggctgaggcaggagaatcacttgaacctgggaggtggaggttgcagtgagccgagatctcgctattgcactccagcctgggcaacaagagtgaaactctgcctcaaaaaaaaataaaataaaataaaaataaaaataaggaagtacctgcaagaaagctactcaaagtaggtcaccagccaggagctctgacccaggctgcccagcctatccttgtgttgtctttttaattttcccttagatggtctgccctttccgtgatttctgtgtagaactctgtatcttgagctgtggtactatttttcttttgtcttttaatttaaaccttggtggagcccttgtgatgaatattaaatacatacattttgggctgggtgtggtgcctctagcctataatcccagcactttgggaggccgaggcaggcgaatcgtgaggtcaggagatcgagaccatcctgcctaacacggtgaaacctcgtctctactaaaaatacaaaaaaattagccgggcgtggtggcgggtgcctatagtcccagctgctcgggaggctgaggcaggagaatggcatgaacccgggaggtggagcttgcagtgagctgagattgcaccactgcactccaggctgggcacagagcaagactccatctcaaaaaaaaaaaaaaaaaaaagacaaaaagaaaacattttggtcattaaaaaacaaaaaaaaaatgatacgagagagcacccagggattataagaggaaacactttattacatcactcatctaacattccagaaaatggaaagtactctactgtacagcaaagtaaatcattggttgtctggagaacagaaagaaagcctttataaaaaggttccaagtaaatataaaggtgttaagttcattattgtgactatgttaatggtttcatgggattatatgaaactcaagatttatcacatgctacagcttaaatatgcatagcttactgaatgtcatttataactcatcacagctttaaaatatacttcagactggcagcagtggctcacacctgtattcccaccactctgggaggctgaggcaggcatatcacctgaggtcaggagtccaagatcagcctggccaacatggcaaaactccgtctctactaaaaatacaaaacttggccgggcatggtggcacatgcttccagtcccacctacatgggaggctgagccaggagaattgcttgaacctaggaggtagaggttgcaatgagccaaggtcatgccactgcactccagcctggctgacagtgagactctgtctcaaaaaaaaaaaaaaaaggttgggcacggtggctcatgcctataatcccagcactttgggaggccaaggcaggcggatcacgaggtcaggagatcgagaccatcctagttaacatggtgaaaccccatctctagtaaagatacaaaaaattagctgggtatggtggcgggcacctgtagtcccagctacttgggaggctgaggcagaagaatggtgtgaacccaggaggcagagcttgcagtgagccgagatcgtgccactgcactccatccagcctgggcaacagagcaagactccgtctcaaaataaataataataataattaaaaaaatgcagttcaaaagaaaaatatagatttaccattatttttggaaaacaggtttggcaactctatactgactacaccaattcttctcatgccctaagtgggaaaactagcctccacggtagcaaatattgatgtggcactaaggccatttccacctgattaagtggctggctggtcacaaaggccacatcactgaactgagatctcccttctccctatcatcttcctcctgttaatgcaggaatgaccttgaggagaacagcccagaatgagtacaggaattcacaaaacctttagattatttcctctgacaatggcctcaacaatacaatattcatcattatggaagtcctgataattcctgtatctgcatattcatcatatacgtagtgactggatcattgtggatgcccttttaaaagacatgcattacgctgcacgtggtggctcacctgtaatcccaggactttgggaggctgaggccagcagatcacaaggtcaggagttcgagaccagcctggccaacatggtgaaaccccatctctactaaaaatacaaaaattagctgggtgtggtggcatgtgcctgtagtcccagctactcaggaggctgaggcaggagaatcgtttgaacctgggaggcagaggttgccgtgagccaagattatgccactgcactccagcctgggcaacagggtgaggctctgcctcaaaaaaaaagaaaaaaaaagaaaaaaaagacatgagttgcagttacattattctgtctcctccactgcctataaataaagtaattctataaaattataatttcacctgatagcattacaatctgtgatgttatcctacagaattctggatatcagggcatgtgtctgcattgcaagagctgggcaacagacttccctcagccgtaccaagtacaatgcaatatacctcgtaaaagaattttgtcttgttcaaaaaatgccagaaattgtcacaaaaaatgccctgtatccagctgacctatgaacccacaaattttagtatccgtgctacagataaagaccacaaagccctgaaggtcttctctggaggcctctggcagctatgcaaagcagtccacaagtggagaaagctacattctgcattcatactgttccatgagccacaaagtttagctatgccaacaaaagctgtgacccccttcatagtaacaggacctacttatttctgaaccacccatacagtgacaacaaccctcaagattgaagaaggctgaaacaataaggccttcataatagcacaaaccggagaaatgggaggcaagctgttcttaggatcatgacttggagggtagaaaatttgtcaagattgatgtgatacccacaagatctctgaaagacatagtccgtcttttcaagtcaacgtaagaggcctctgggataaaaatgggtaacgtccatggcatgacttatcagacagaaaaaaatgacaaaggaagaagtgctgaagctactcaacaaatccttctgtgactcgatcagaaattaaaagttaaaaaaaaaaaaaaaaaaggccaggcacagtaactcacacctgtaatcccagcatgtttggaggccaaggtggaaggatcgcttgagccaggagtttaagaccagcctgggcaacatggtgagaccctgtctctccaaaacttaaaaaaattagtggagcatggtagtgcatgcctgtggtttcagctactcaggaggccgaggcaacagaatcacttaagcccagatcaagggtgcagtgaaatgtgaacacaccactgcacgccatcctgagcgacacagtgacaacctgtctcaaaaaaaatctagcaaggtacctgggtatagtgaaaaatgcactgtagctgccacacacttggaacttttgcagatgctcaataaatgacattcaatctaggtaggtggcactctcaaagggttacattgaaaaagaaataacattccatatacatctatggtgtttttctcatgtcaatgtttgaggctccaataaaaaggctgaaggctttcttgcattcattacattcaaaaggcatttctgcagtgggaagtctcctgtgtgttatgaagctagatttctacataaatatctcacatgtcacactggtaaggccctgatccagtgttaactctgatcttgaaggagcaaagaggtgtggctacaaaattgcccaaatgtattttatttgtctagtgtgaactctctgatattcaaggagaaaagaccttcaggtaacttttttcccacatttgctgcaatcacaagaccttactccagtgtgaactctcctgtgtttaatgagactgaaagtttcagcaaaggatttcccacattcactgcactcataaggtggtgtgaccagtgtgaactctcttatgaacacagaatgcagagctgtgggtagatgacttcccacaatcactgcattcatatggcctttctccagtgtgaactctctggtgtgcaatgaggtggtccttcttgctaaaaactttctgacaatcctcacactcatatggcttttctccagtgtgaactctggtgtacaaggaggtgagacttcttgttaaataatttcccacatttctcacatttataaggcttttctccagtgtgaactctcttgtgtttagtgagactggagctttcagcaaaagattttccacattcactgcactcataaggcttttctccagtgtgaactcttttgtgttttgtgaaactggagctttcagcgaaagattttccacattcactgcactcataaggcttttctccagtgtgaattcgcttatgaacacagaatgtagagctgtgggtaaatgattttccacaatcattgcattcataaggcctttctccagtgtgaactctctgatgtgcaatgagttggtacttgtttctaaaaaatttctgacaagcttcacaagcatatggcttttctccattgtgaattctctggtgtacaaggaggtgagacttcttcttaaataattttccacattccctacatacataaggtctttctccagtatggccatgctggtgtagaatgaggttacccttgtgactaaaacatttcccacattccccacacttaaaaggtctttctgtagtgtgaactcgctgatgattcctaaggtgtcctttttcattaaaagatttcccacagtctccacacttgtaaggtctttctccagtgtgcatgcgctgatggtgaacaaggctgcgcttatgactaaaagatttcccacattctccacactcataaggcctctctccagtatgaacgcgctgatggctcctaaggtgcccgattgaactaaaagatttcccacattctccacacccataagatctttctctagggtgaactcgctgatgtagaatgagggtgcctttatgactaaaagatttcccacactctccacactcataaagtctgtccccagtgtgaatttgctgatggttcctaagatgtccttttgaactaaatgatttcccacattctccacactcataaggtcttgctccagtgtgaactcgctggtgtagaacgaggttgcccttttgactgaaagatttcccacattctccacactgataaggtctttctccactgtgaactcgctgatggtgaacaaggctgcgcttatgactgaaagatttcacacattctccacacttgaaaggtctttctccggcgtgaactcgttgatggctcctaagatgtccttctgaactaaaagatttcccacattcttcacacccataaggtttttctccagtgtgaaatcgctgatgttgaatgaggctgctcttttgactaaaggatttcccacattctccacattcataatgttttttgtcagtgtgaactctctgatgattactgaagctagcatatttgctaaacgatttcccacattctccacattcataaggtcttttcccagtgtgaactctctgatgattactgaagctaacatatttgctaaaggatttcccacattctccacattcataatgttttttttcagtgtgaactctctgatgattactgaagctagcatatttgctaaacgatttcccacattctccacattcataaggtcttttcccagtgtgaactctctgatgattactgaagctaacatatttgctaaaggatttcccacattctccacattcatgttttttttcagtgtgaactctctgatgattactgaagctaacatatttgctaaaggatttcccacattctccacattcatgttttttttcagtgtgaactctctgatgattactcaagctagcatatttgctaaaggacttcccacattcacagcacacataacactcttctctagtgagcagtctctggtgctgactgagtatatgtttggtgctaaaatgtttcatggattctccacagctgtagtgagctcccccacactgaatgggagacacacactcagttttgctgtttgacttctccccagtgtgactggcctcctgctggagtaatcctgacctgggcaaaaagtccttcccactctcactgaagacagatgactcccctgacacatgcaacttacacctctttgcaaacaacgcctcctcaacactccctctgtagggtttctctccaatgtgctcattctggtgctgatgaaagtttccactgtcatacaatttattcccccaggcctcacacctgtgcagtttctgcttgtgatgtgttccctgatgatctgccacatgcaaaatgtctcccaagatcgggccacacatctcacaggggtgggccttcttgggagacacacctgccataggagtcctgacctgagtctctctttgtatataaatactctgcttagaaggtgccgcctcatcttccactccacaccaacaacctgaaagcaagaaaatgctggtgaagtgcatgttaactctggtgggaaggcacagaccacccacaagtgtatctgaaaaactgaggaattactccaaggaactacttggaggaacaggatgttggcttcaggcggaagatggtgctatgtattattactggactataacggtcacagaatgtaggaggcctcataagttaaaggacacaaccatgtatgtaaaacagggagtacaggcagggtctacaatccctgcatctgcaaaccactcatctgcagaatttatgtcctcatgacatgtgagtgctgtagagagggatttgtccaggccaaggaaaacacaagcacaacacagcagctactcgaggagagtttaacaaagtatatatattcgctaacacaaatctctatgccaacactggagagaacactgtagatggtgacgtatgtaaatggatgagatctggggcccagagatatgaagattagataggagaatggacattagggtacaagttcatgtacaagtgggtcaaaagttaaaaaagaaagagtagaagcgataaggtagacaagtgtgatgctctcaagaatgaggaagaaaagacaaattatgtgtgcctacttgccttgccacaaaactactactaaaatagaacaggttgttggtatgctttcaataaagccctgactccatgacctcctccagggtgccgctttttttttttttttttttttttttttttttttttgagatggagtctcgctctgtcacccaggctggagtgcagtggtgcgatctgggctcaccgcaacctcccctcctgggttcaagcaattctctgcctcagcctcccgagtcactgggattacaggcatgtaccaccaggcctgactactttttgtattttagtagagacagggtttcaccatcttggccaggctggtcttgaactcctgacctcatgatccacctgccagggcctcccaaagtgctgggattacaggagtgagccaccatccccagcccagggtgccactctttagggactcactccttctgagcctattatgctgaggctgaattcatttgcatcttctggatcaaatggaggactgtgcctcccaccacaatgatgaccaaatacatgggacatgaatgatgcacagactaagggaaagacagaacaagggaacagccaacattgtctcagaacaactcagcccatgacagcccatgagagaaaaaaactgagtatttcaaggagaatttctaaagaaggtcttgcaagaacagcctctggtctatataggcagtgatgtagtctgtgaaggcaattcctgccacaggaaggcataagaaaatagcagctagagaaaggaagtagactgtgggtacacaggaacctgaaatctggacaaggacacccaaacatccacaggactaacaaggtgggcttctgactgggaatccctccctgggagcctgcagtaaagcaggtgttggggctgctccaagaaaggagtagggcagtatgtacacctcagacctaccaaccaagaacctacccacagaactgaagcaggaagctgtgtccatgctcctgacatgagaaagtcttaccaatggggaaagataggggaaaacagagactagctcaggtcacagggtgagtgtgagcaacttacccagggaggatataagtgccaggttctccagcgtcacatcacggtacaggcatctctgagcctcactaaggagattccattcctcccaggtaaagttcacagccacatcttcaaaagtcactgtgccctgttatgatgttgacagatgaaactacaaactgcccctatgctgaggtatcacaatccatctctcccacacatctactctcgcacatcctcctctcaaggtcctcaaacataggagaaactaggcccactggtcatggggtatagccaccaacaatagttgaacaaataggtatctgtgtggtggttgtgacgtaagagtccaccccctcctgacaggcactttccctagtatggccaaggtcatggaaagcccaatgtggcaccttcagcacagcagagataccctctctgaacacacctcattctttagacttccaggtacattccatgtccatccccaggtgactgccacacaccactggcctctctctggcctttaaacaacttaaagtatatttttttgtttgtttgtttgtttgagacagagtctcactctgtcaccaggctgaatgtagtggcatgatctcggctcactgcaacctccacctcctgggttcaagcaattatcctgcctcagcctcccgagcagctgggattacaggcatgtaccaccacacctggctaatttttgtatttttagtagtgataggatttcaccatgttggccaagctggtctcgaactcctgacctcgtaatcctcccacctcggcctcccaaagtgctaaaactacaggcatgaggcaccgcgcccagccagcttaaagtatcttaattccctcctttttcttcaactagtgtgggttgatatctacccctagggctataatgttggtaaaacaaattacatctgatattctacacatgtcatcaagagcaatctacaaatcaattgtattgagccaggcgcggtggctcacatttgtaatcccagtgatttcagaggccgagccaggtggattgcctgaggtccggagtttcagaccagcctggttaacaatgtgcaacttcggctctactaaaaatacaaaaaattagctgagcgtggtgtcgggcgcctgtgatcccagctacttgggaggctgaggcaggagaatcgcttgaacccaggaggcagaagttgcagtgagccgagattgcgccgttgcactctagcctgggcaacaagagcaaaactctgtctcaaaaaaaaaaaaaaaaaaaaaatcaaatatattaacagcctgataagagggacaccactcaccacagagagccacatgggggttgcattgtggataagagagagcaaccatggccatggcatgcaagctttgtaagatgaagagagtgtaatggcctgattccctcaggaggatgccattgacttatttgaataactctggacataaaaatggaattgaaactcactacaaactataacaggaactctgcctggtcccattgatcgaaaggcttcagaggctaggatacattacctttttttttttttttttgtgatggagtctcactctgtcaccaggctcgagtggggtggtgcaatctcggctcactgcaacctccgcctcctgggttcaagcaattctcctgcctcagctcctcagtagctgggattacaggcatgtaccaccatgcccagctaatttctatatttttaatagagatggcgtttcaccatattgggcaggctgctttcaaacccctgatgtcaaatgatccacccgcctcagcctactaaagtgccgggattacaggcgtgagccgctgcacctgttcagatatattacttaagagtgtgaagtggccagtcatggtgtctcacacctgtaatcccagcactctgggaggccaaagtgtaaggactgcttgattccaggagttcaagagcagcctggacaacacagcaaggtctttttctacatacatgcacacacacacacgcacacatacacatgcacacaagggaaaaaaatttaaaatatataaaaagagagttaaatgggaaagaaacttgcactcaggccatttgtggttataccaatatgaccaggcatccaggtggcaaatcacactgggccttaatttttggccttacactacatcgtagctgacaccatccagagtgtatggcccattcaaaccgatccaatattaccacagaactgcaattctattggatcctaaaaggagcggtggtctcaagtaattctgtgaggacctccttgcatggctccacagaaacacagaaccatgtgtggcttcagctatccatgaccctattccacttctgtgctacacttgccagcccctcagcaatgatgacctttccctcaattacttctgtacttctgcctgcatctcatctctattatctccatggaagtctgccccacgacaagctatgccctctgatacaccctacattcattgtcacttacctccctctcctgtgtgaatgcataacacaggttatgaatgccaataatgtccgccagggacccaggcaaaacatctagtcctcagcctccaaccagtcctttctggttccctaaaagatttactaccttattatgaagtgtgccctccaaaatgggacccatggctaacgcaccttagtccacacattagctatcatatactggatgtctccaatatcaattccttcccagatatcccgacctatgtggacaagcatctcagggtctgagcatggtgaaaacaaccctccttatattcccagtgactatattatgcctactcccaacttgctcatctcagctgatacagcttctatcactgctgctgctaaggccaaaaaccctagggttgccaggcacggtggctcgagtctgtaatcccagcactttggaaggctgaggtgggtggatcacctgaggtcaggagttcaagaccagcctgaccaatacggtgaaaaactctgtctctactaaaattacaaaaattagccgggcgtgatgccgtgtgcctcctgtggtcccagctactcaggaggctgaggcaggagaattgcttgaacctgggaggcagaggttgcagtgagcagagatcatgctactgcactccagcctggtgacagaacaagactccacctaaaaaaaaaaaaaagcaaaaacaaaaaacccccagcgtcatacctgaaaccctcttgcatgtccttaccgaccgcattagaaaatctagctgctcctttaccaaatgtaaatcacaattctagcgacatctccttggccaacaatcatccattaaacctcacctggatgacagaatgagcctcaacgctgtcttccttcctcctcccttaaccccatgttcctttctccaatgtggagccaggcagagaagtaacatcacctccccactctgatcagttttatctctgagcatttcacatactgctaccaaatccaaggctgaccttctaagtgtttacacagtttcactgaaatgggaatacctccataccacctgcgttatggacttagggcctagggtttagggtttctctagtgtttccggttgaaaggactgagctcgagaggtgcaacagagcaggatggcggaatagaaagctgcacccatcatacccttaacagaacaccttttttttttctttttttttttaagagagagtctcgctctgtcaccagggctggagtccagtagtgctaccttggctcactgcaacctctgcctccggggttcaagcaattctccctaattctccctgcctcagcctcccaagtagctgggattacaggcacctgccaccacactcgactaatttttgtatttttagtagagacacggttttgccatgttggccaggctggtctcaaattcctgacttcagttgatccgcctgcctcagcctcccaaagtgctgggattacaggcgtgagccaccacacccggcccagaacaccaaatttaaacactgtcaacacagaaaaaaatcacctttgtaagaaccaaaaatcaaatgagcactcacagtacctggatttaattttgtattactggaaatggcactaaaaggggctgtagagtcttgagttgccaatgccactcctccccatcccccagcagtgcctgcctgttgtggagaatctgtgctcctgggaagggaaagcgcagtgactgtcagacgttgcacagaactcagtgcttccctgtcatagcagaaagcaaaactgggctgaactcaacggacgcctacccagggagtaagcatagcgaccagcccagccagaggggaatcgcccaccccaatggtcaggacttgagatctggcaagccttgccactgtgggctggagggctctgaagtcctaaataaacttgaaaggcggtcgaggccacaaggactgcaacccctaggcatgtcctgtgctgagctgggctccgagccaggggacctggttgggttgggggagcacaacctactgagacaccagttgaggtagctaagggtgtgcttgtgccacccctcatgcaaccccaggctacgtggctccttccttccactcgaggagaggagagggaacagcaaaaagaactttgtcttgcattttggatgtcacctcagccacaggatagggcactgggcagggttgtgaggacccattccaggcccacccagataatatttctagacacactctggaccaaaacagaacctgctgccttgaagggaagaattcagtcatgggaggacccatcaccttctgactaaacaacccttggaccctgaataactagcagcagtacccaggtagtatgcgatggcactgggtgagactctgagacatgccagcttcagatgtaacacagcacactgctagctgtggtggttacggtcagagaccccacctgcttgagaataacagaggaaaaagtaaaggggaccttgtcttgcacctcagctgccagctcaaccacagagggatagagcaccaagaagcctcttggggtccctgattccaggccttggctcgtggatgacattgctggacctgccctgggtgagtcttgaagagtcagcctcagaccaggcaacattcaccacaagctgactgaagagctcttagcccttaatggaacctcagtggtagtctgacagcactccctgtgggcccgtgctggtggtggccacagagtgaggctgctctgcctgtggaaaggggatggaagagtgggaagggctctagcttgtagtttgagtgccagctcagctgcagtgcaaaggaacaccaggtagatttctaaggatttttactccaatccctggctcatggatggcatctgtataccaacctgaggcctggggaactcaccgtcctaaggagaaggacataagcctgtctggctttgccacctgctgactgtaccgggctagggccttgagggaacacaggcgatagccatgtagtggtcacaggagccttgggtgaaacccagtgctgtgctggcttcagctctcacccagcacagtcccagtggtggtagctaaaggggtgcttctgtcccaacccccagtttcaggcacttcagcactgacagagacatgctgggacaaagtgagggaagacccaacaagagtctctacctgttatgttaatcaagggaaatatttcagatcttattcaagaccacaaaggtggtatagctctctgagtctgcaagagtcacagcattactgagtgtggggttcccgctgaagtagattcagcttagatcacaacacccgggtcctttcaaatacctggaaactcttcctaagaaggacaggtacaaatgagcccagactgtgaagaccacaataaacacctaactgtttaatgcccagacactgatgaacatctacaagcatcaacaccatccaggaaaacgtgacctcaccaaacaaactaaataaagcaccaaagacgaatcctggagaaacagagatacatgacctttcagacagataattcaagatagctattttgaggaatttctcaagacaaacacggagaaagaattcagaattctatcagataaatttggcaaagaaattaaaataattaaacagaactggccgggtgtggtggctcacacctgtaatcccagcactttgggaggccgaggcgggcagatcacaaattcaggagatcgagaccatcctggctaatggggtgaaaccccatctgtactaaaaatacaaaaaattagccaggtgaggtggcgggcacctgtagtcccagctacacgggaggctgaggcaggagaatggcatgaaccccaggggggcagagcctacagtgagctgagatcacgccactgcactctagcctgggcgacagcgagactccatctcaaaaaaaaaaaaaaaatagaactggccaggcatgatggctcatgcctgtaatcccagcactttgggaggccaaggcggatggatcatgaggtcaagagatcgagactattctggccaatatagtggaaccccgtttctactaaaaatacaaaaattagccggatgtggtagtgcacacctgtagtcccacctactcgggaggctgaggcaggagaatcgcttgaacctgggaggcggaggctgcactgagctgagatcgcaccactgcactgcagcctgggtgacagagagagaccctgtctcaaaaaaaaaaaaaaaatcaaaatggattaaaaaagacttaaatctaaaacctaaaactatgaaactactaccaaaaaagactgaagtgggcaaagatttctttatttttttttttgagatgaagtctcactctgttgcccaggctggagcgcaatggcacaatctcggctcactgcaacctccacctcccaggttcaagtgattctcctgcctcagcttccgagtagctgtgattacaggcatgtaccaccacacccagctaatttttgtatttttagtagagatggggtttccccatgttgcccaggctggtctcaaactcctgacctcaggtgatctgcccgccttggcctcccaaagtgctgggattataggcgtgagtcaccgagcctggccgacaaagacttcttgagtaatacctttcaagcacaggcaaccaaagcaaaattggactaatggcatcagatcaagttaaaaagcttctgtacagcaaagaaaacaatcaacaaagtgaagagataacccacagaatgggagaaaatatctgcaaactacccatctgcaaagggattaattaccagaatatatagagttcaaacaactctataggaaaaacccttaataatcccatttaaaaatctcaatagacatttctcaaaagaagacatacagtcaggagcagtgcctcccagctataatcatagcagtttgggagactgaggcagaaagaccacttgagcctaggagtttataaccaccctgtttaaccagtgagacccccatctctacaaaaaagtttaaaagctagccaaggcaaggtggcacatgcctgtggtggtccctgccacttgggagactgaggtagcaggatagcctgagcccaggtggtcgaagctgcagtgagccatcatcacactacagcattccagcctgggtgacagagcaagatcctgtctcaaaaatacaaacaaaagacaatgacatacaaatggcaaacaggtataggaaaaggtgctcaacatcactggtcataagagaatgcacatcatctcaccccattaaaatggcttatttatatccaaaagacaggcaataacaaatgctggtgaggatgtgaagaaaaaggacctctcgtacactgttggtgggaatggaaattagtacaaccactatggagaacagtttgggggttccttaaaaaactaaacattaagctagcatataatccagcaatcccactgctgggtataaaccaaaaggaatccagtatatcacagagatatctgcactcccatgtttgctgcagcactgttcacagcagctaagacttggaagtgacctaagtggtcatcaacagataaatggataaagaaaatgtaggccggacgcagtggctcacacctgtaatcccagcactttgggaggacgaggccggtggatcaggaggtcaggagatggagaccatcctggctaacacagtgaaatcccaatctctactaaaaatacaaaaaattacccaggtgtggtggcacacgtgtttagtctcagctacttgggaggctgagacatgagaatcgcttgaacccaggaggcggaggttgcagtgagccatgatcgcaccactgcactccagcctgggcaacagagaaggactccgtctcaaaaaaaaaaaaagaaaagaaaatgtgagggcgcggtggtggctcacacctgtaatctcagcacttcgggaggctgaggtgggtggatcatgaggtcaggagttcaaaaccagcctggccaagatggtgaaaccccatctctactataaactacaaaaattagccagccgcaatggcaggcacatgtaatcccagctactccagaggctgaggcaggagaatcgcgtgaatctgggcagcagaggttgcagtgagccgagattgcaccactgcactacagcctggacaacagagtaagactgtgtctcaaaaaaaaaaaaaacaaaaaacaaagaataagatctagaaaaagagaataagatctagaaaaagagaataagacctagaaaaagagaataagatctagtatttagtagcacaacagggtgactacagtaaaaacaacctaattgtacatttttaaataacaaaaagagtataattggattgtttgaaacacaaaggataatgcttgaggtgacggatacattaaccctagtatgattattacccactgcttgcctgtatcaaaatatctcctgtaggcggaggttgtggtgagctgtgatcacgccactgcactccagtctggatgacagagtgagactccttctcaaaaaaaaaaaaacaaaaaaacaaaataactcctgtaactcataaatacatacacctattatatacccacaaaaatttaaaatttaaaaaagaaaatatttttaaaaataaaaaataaagagtcccacaacaccacaagctagagaacatataggtcggggtcagtaccagtgagggaatggaacactctccacttccttatctgagttcctaaaatgcttctaagtgcttggaggagaggcagacattacaggaatgtgtccctgataggatgtgataagctcagacctccaggtacccctccttggccctggagtcaggtgacctcagactgcttgtctgacctgcatgcctcaatgtaaaatgtcatctctgccacctatgtgatctacaacaaagattcaacctcccagggccccacggtgctcatcacttctctccactctgttcttcctttgattggccttcggaaaacctttaaaatccagattttgatcctgtcctttgtatagagcacacttgacataactaactccatcttagaaaaagacaatttgtatttcacagggcactctgccatcaagggtaagatgctttgtttaataaacaaaaaaaaaagacggccaggcacggtggttcacgcctataatcccagcactttcggaggccgaggcgagcggattgcctgagcttgggagttcaaaagcagcctaggcaacatggcgaaaccccatctctactaaaaatacaaaaaattagccaggtgtggtggcgggtgcctgtaatcccagctactcgggaggctgaaacaagagaatctcttgaacccgggaggcggaggttgcagtgagctgagatcacaccactgcactccaggctgggtgacagactgagacgctgtctcagtaaaataaataaataaataaaataggctgagtgtggtggcttatgcctgtaatcctagcaagttgggaggctgaggcgggcggatcagttgaagtcgggagtttgagaccagcctgaccaacatggagaaaccccgtctctactaaacatacaaaaaattagccgggtgtggtggcgcatgcctgtaatcccagctactgggaggctgaggcaggagaatcgcttgaacccgggaggcagagattgcagtgagccgagatcacaccattgtactcctgcctgggcaacaagagcgaaactccgtctcaagaaaacaaaacaaaataaaaaataaagactacatctaaccaggtaaggtcacaaacaaggaaactcttccactatcagttctcaccagagtattctgtaactgtaaaagattaggccttcagcagctcaaaactcagcatctgctgcctaaggctctgccacctcaaagactcttccttgtaagactgcaggccaattgcccaccaactggcccagaccaagatgccttttgtcttccttgctccctctaaactggttccataacgtttgctcctatatctttttcctcttgatgctaagcattattttgttccttgtgttgtaatgcccaaccttgttttcactaatcctgtttttagactctcccttttgctctcttaatcacctagcctcgtttccacatgaatagactctcgcttagctgagaaagccagacgagctccacctggcccccttgatttacaagacattaaggactccttacccacccccctttcctcaaggagttaacttgtgtaagcagattctcaacatatcaaaggagtccaattaactgataagggactgggaacaaaccatgtatgaagttcccaggattttgctcaaaagataacaccataaagccttgagtttgtgtctggcgtagtgcccatatctaactcttatgaaggatttagagcgccacacctggtaccttgcctttttgtaaccatttgtcttttaaattgtttgtttctctgtaaccatttatccttttaattttttgcatgtttttacttctgaagagttgttgcatttaagctcccctccccttcctaaaccaaagtataaaagttaatcaagccccttcctcggggccgagagaattttgagcgttagccgtctctttggccgccagctgaataaaggactcttaattcgtctcaaagtgtggcgtttttctaactcgcccgggtacaacagtgttatgtttaacctttaacatttacatgttaagtatactattgtgtattgtttgctatattgactgacttggggagtgtcttcagcctctgtgcccatggccaactaccaagtgaactggaatcacaagagaattgcctccttcgaactccatttagctcatggcttttgttgactcaaatatcacctgacactgtgcaaagacacaaacatgcatggacctgattatctctacccttacaatgctcatgacatccctcctttcttcgaaaatctccatgccttctagggtcctcacgtgagttcatagcccccagcctgcttgctcttccaggaggagctccgcctcataatttgctcccaacaggcacctgtggaccccagattccatccttctggctcagttcacttccaggcctttgcccgcgccagtccctgtacctgccggtctccccaccgcatcccacgggtgtcagaaatggggcccctcccgcaagcgcctcagtgtcccaacgccggcgtccgggctgcagagccgtgaacaggcgctgctacctcgctgcttttgggtgacgatgaggtgacctgaggacacagaaggccccacaattacctgagcggagagcctcagcgtagccgcggcagccatcgaaccacgtggttttaagcagagtcgggaggatagggcgaccagccaggagatatgggcacgacggtccgtatcctggcccaggagtgggtcacgctgggcgccgtcacagagctccagagtagcctctgtgcagcggaggacaactgctccccgacttctgggttcagtcaccacagtgcggacctagcgctcaggagcctctcctacaaataaatccaacaccaatcaaaatggccgccaccagagggcgccggaagtccggacccattgtcacgtgcacacaggaaacgcctttattctgagccctcagaggtcttctacgctatcattcgaggctgagttttctgggtaatgtagttccctaggcaacaaggagggtaaagggcgcaattcccagaggcgcttctgcaggaaaagcccagcttcacctcgggagtatccttaagatgtgcgtcctgactggtatggtggctcccgcctgtaattccaccagtttgggaggccaagtcacaaggatcatttgaggtcaggagttagaaattagcctgagcaacaaagcaaaatcctgtctctacaaaaaataaaaaatattagcggagtgtggtcgggcgggcctgtggtcccagctgccctaaggttggggttagggttagggagcctgaggagggagaatcgcttgagctcaggagttcgaagctgctgtaagccgagatcgtaccactgcattccagcctgggcaacagaacgagacctcttatctaaaaaataaaaataagggccaggtgcgggcggctcacgcccgtaatcccagcactttgggaggccgaggcaggtggaacacctgaggtcaggagttcaagactggcctggccaacatggtgaaaccccgcctctactaaaaatacaaaaattaacccacatggtgacatgcgcctgtaatcccagctactggggaggccgaggcaggagaatctcttgtacatgggagtcagaggttgcggtgagtgagatcctgccactgcactccagcctgggtgacacagcaagactccatgttggaaaaaaaaataaaaataaaaataaaaaaataaataaaagattgcagatctttctcctaggcagaggatcatcctgcctctccttagaactcacattgagatttcttggggttattggctgtaactgattaccctagtgtatggaaaaatattatttcagagttagtgtagatgttcccaaaggctacagatccaaattcacctatcatttcagatggtccttcagatgcaaaattcttccactggaagcaaagattaatgcaaagattaataaccattattgtattgttaaaatgaacgtgtaaacacccagagggttcatttttcctactgcccagataaagccaatttatcaggacagggaaattgcaaaagaaaaagagttttattcacacagagttggatgaacagcatactggagtcttactagtattactcaaatcagtctccctgaaaattgcgagactggggttttttgttgttgttgttgtttatttgtttgtttgttttctgagacagaattttgctcctgttgcccaggctgaagtgcaatgtcacgatctcagctcactgcaacctccgcctcctgagactggggttttttaaggataatttggtagatagggggccatgaattggggaatgctgattggttgggttggagatgaaatcatagggagtcaaagttgttctcttgtgctgagtgggttctgggggagagggaggcacaagaccagataagccagtttacccatctgagtggtgccatcagatccatcaagttcagggtctgaaaaatatctccagcaccaatcttagcttttgcaatggtgataccatccctaggaacaactggggatgtttacagtcttgtggcccctggctgcatgactcctaaatgataatttctaatctatggggccctaataaatcagtaagttaacaggaattgggaaggagccaagctggcagaacaagaacctaaccccatctgcaacctctttgtgggaagaaaccacagctgtcagaagtgtttaacagagcaactccgtcttgaataggggttggataaaatgaggctgagctgcattcccagacagtgaagacattctaagtcacaggatgagataggaggtcagcacaagatacaggccataaagacgttgctgataaaacagtttgcagtaaagaagccggctaaaacccaccaaaaccaagatggccatgagagtgacctctggtcgtcctcactgcaacactcccatcagtgccatgacagtttacaaatgccatggcaacatcaggaagttatcctatatggtctaaaaaaaggaggcatgaataatccaccctttgtttaggatataatcaagaaataggggccaggcgcggtggctcacgcctgtaatcccagcactttgggaggctgaggtgggtggatcacaaggtcaggagatcgagaccatcctggctaacacggtgaaatcctgtctctactaaaaatacaaaaaattagctgggcgtggtggcgggtgcctgtagtcccagctacttgggaggctgaggtaggggaacggcgtgaacccgggaggtggagcttgcagtgagccgagattgcaccactgcactccagcctgggtgacagagtgagactccgcctcaaaaaaaaaaaaaaatcaagaaataaccataaaaatgggcagccatgccaggcatggtggctcacccctggaatcccagcactttgggagaccaaggtgggaggatcatgagatcaggagatggagaccatcctggctaacaacagggtgaaacccaatctctactaaaaatacgaaaaaattagccgggcggctctgtctatggagtacccactcttttattcctttactttcttttcttttttttgagcaggagttttgctctgtcacccaggctggagtgcagtggcatgatctcagctcactgcaacctccacctcctgggttcgagcaattcttctgcctcagcatcctgagtacctgggactacaggtgcgcaccactatgcccggctaacttttgtatttttagtataaacacggtttcactatgttggccaggctggtttcaagctcccaaccttgtgatctgcccacctcagcctcccaaagtgttgggattacaggcgtgagccactgcacccggcccagaccaatgtatttctttaatgtatttgattgatgtctcttgcctccttaaaatgtataaaaccaagctgcgccctgaccaccctgggcacatgttctcaggacctcttgagggctgtgtcacaggccatggtcactcatatttggctcagaataaatctcttcacatagtctacagagtttgactcttttcattgacactgaagaaacccccaacccagaggaaaatcatctgtgtgcaccacttggctcactttgagtgagtggggtgcatatacccagataaagaatgagattggtttacaggcccaacttggtggagttagagtctctcctggttaaaggctcctctcaataaaaggcaaggacacttgaccaaactttggttcaatgcccaaattaggaagattagattacttcctaagagttagggggttagaggcccctctcagtaaagtccctcttggctaggaatgggtttggcacaatgggctgttaactgctgttctctttggaataatctgccttgctgatggctatgggtgacaggactaggaatgtacaggatcatgggacatggggagctttttcctccccaaaagggaaaacttgcgagctgatgggactgctggaaaagatccccttgctactgacaagcagccacctgaacttttcagtgtcactgcaatgggagtggggggggcttctctggcctctctaagctcctggccttccccaccctgccacaggcaatgtttttctctgtctcctttccctttcttatcttttctgttattcagggtgaccatcttgcccagagaccaagttgaaactcatggtcggaggttggattaaagatgatggggcccaaccagggcaagtttgagccttgcctgttagatattccaggcggagccgagtggctaatgtgtatgttttgtcacacgtattttgctctggccagaatggaaaaagataatttagctttgtattgcagattggcccccaagggtgtggtgcagccagctgggtcactagaggctctcagggaaaggcaaaccagaagcctggaatgctggaatgccagcaaaagggtaagaatttcttttttgttattgattttttttttttttttttttggagacggagtcttgcactgtcgcccaggctggagtgcagtggtgtgatttcggctcactgcaacctccgcctcctgggttcaaacgattctcttgcctcagcctcctgagtaggtgggattacaggcacgcaccaccatgcctagttaatttttgtatttttactacagacaaggtttcaccatgttggccaggctggtctccaactcttgacttcaggtgatctgcccgcctgggccccccaaagtgctggaattacaggcatgagccactgcacccagcaagaatttcctaccagtcagttggctgggtgtggtggctcacacctgtaatcccagcactttgggaggcagaggcaggtggatcacctgaggtcaggagttcgacaacagcctgaccaacatggtgaaacaacatctctactaaaaatacaaaaaattagtcatggccgggtgcgggggctcatgcctgtaatcccagctctttgggaggccgaggtgggcagatcacttgaggccaggagttcgagaccaacctggccaacatggtaaaaccccgtctctactaaaaattgaaaaaataagccgggtgtggtggtgcatgcatgtaatcccagctactcgggaggctgaggcaggagaatcacttaaacctgggaggtggagattgtagtgagctgagattgcaccattgcactccagcgtgggtggcagagagagaccccatctcaaaaaaaaaaaaaaattagtcgtgcatgttggtgtgcacctgtaatcccagcttctcgggaggctgaggcaggaaatcacttgaacccaggaggtggaggttacagtgagctgagatggtgccactgcactccagcctgggtgacagagcgagactctgtctcgaaaaaaaaaaaagtccaggtgcagtggctcatgcctgtaaccccagcactttgggctgaagtgaggggatcacgaggttaagagctcaagactatcctggccagcatggtgaaaccccgtctctactaaaaatacaaaaattagctggacatggtggctgtagtcccagctgctcaggaggctgaggctggagaattgcttgaacccaggaggtgggggttgcagggagctgagatcatgccactgcactccagcctggcaacagagtgagactccatctcaaaaaaaaaaaaaagaagccgatttgcccaaatcaaagaaagaaaagaagtgggttttcttattttgtttcattttgtttttagtctgtaaatgaaacaaaacagcaaggagaaaagtcccctgatttgtatcctagtgcttcttgatcacacctagttggcatagctgcaaaaagcatagccggctgggtgcagtggctcacacctgtaatcccagcactttgggaggctgagacgggcagatcacgaggtcaggagatccagaccatcctggctaacacggtgaaaccccgtctctactaaaaatacaaaaaaaaaaattagccgggcgtggtggcgggtgcctgtagtcccagctacttgggaggctgaggcaggagaatggcatgaacctgggaggtggagcttgcagtgagccgagattgcaccactgcactctagcctgggcaacagagcgagactccgtctcagaaaaaaaaaaaaaaaatcatagccacatctatctaatcttattgctcatagctgttaaataccaaacctgaatacgcaattttagaaacggagccttcaatgctttttgttcccaatgtttcacaagcaaatggatggaaatcagaaggcacacaggggaagagtataataaaagccctaagacaagttaaatgaagtcccctgaaaatgacagtgaagcagagcaaccaagagattgattcatacagcaaagaggacaagacagattaatgcaaagttgacatcctgtggtgccaaaccagttcttagccaagagggactttactgagaggggcctctaactcttaggaaggactaaatcttaggaaggactctaaccttcctaaattgggcctcaaacccagggtcagtcaagcctccttgccttttcttttcttttctttcttttttttttttttgagatgaagtctcactctgttgcccaggctggagtgcagtggtgcgatctcggctcactgcaacctctgcctcctgggttgaagcaattctcttgcctcagcctccctagtagctgggattacaggtgtgtgccaccacacctggctgatttgtgtatttttagtagagatgggttttcaccatgttggccaggctggtctcgaactcctggtctcaggcaatccgcccgcctcggcctcccaaagtgctgaaattacaggtgtgagtcaccgcacctggccacgtccttgccttttattgagaggaaactttaaccctctctgtcttaggagagactctaactccctaagctgggcctctaacccaatctcatcctttacccaggtgccccaccacttacccaaagtcggccaattagtgctgcagcctatttcctttgggccggtgggtttcttcagtatcatcccttcaaggttcaccagaaagatgttaccagaaagggcgtcccaattcagaccccaagagagggttctttggatctcacacaagaaagaattcagggtgagtccacagtgcaaagaaaagtaaatttgttaagagagtaaagtgatgacagaatagccactccatagacagagcaggctcttcccgaaagtcagaggaggaatgcgtccaccctaggtacttgtttatacatagtgtcaggaataacgctcaaaattttaaggaaattgaacactcgaacaaacgatttttagcaaagaaattttacgtttgcacagaggggtgcctctttggccagtcgccatgagagcgcacctgaaaaaaggggcacgagagcctttgagcgagccacttttgtgagcgagactccatctcaaaaaaaaaaaaaaaaaaagaattggcagagattttaaaaaggcttataaagaaggagccaaaattccagtttctgattggttggtgtgggcattgataaaggctgctcttgagccatttcaaacagatcacgagacagattcagatgaggaagacaagtgtgtaaaaaactaacttcagattctgaatgcgaggagcaaaaaccagaggaaattaagaaagggaaactgaaaagggtatgttttactaacccatcagctccacctgctgaattaagtgaatggccacctcctttccctccccataatgggcgagaaaatgaattagctgtaaaatttactgctcctgtagttgcaacattaaaatctggagcaattggtggtgctatacaaaattctattcaaaaggctagagctgagggagaccttgaagcatggcaatttcctgttactatcacccagcaaggagggaaaaatatagctagttgggccacattttcttttaagctattaatggaatttaagcaagccattagtcaatatgggccaaattctccttttgtacaaactttactaaaaaatgtggctctgaataatagattgataaaatatgactgggatactttaacaaaatctgttctcactctatctcagtacttacagtttaaaacccggtgggctgatgaagctcaaactcaggcaagggaaaaaacacaagcacagccatctgtgcctgtttcctttcaacagttaaagggagtcagtcctaattggggtcaattagaaaatcaagcagtaatggagaatgttgccattgttcagttatgcactgtgtgcttacgggcatgtgacagaataaatgttacaggagaaaaatatccttttttcagttctgtctgacaaggacctaaagaaccatatactgattttattgctcagctccaggaggctgtgaataaggccataactgacaaaacagctcaagatgttgtaatacagcttcttacatatgaaaatgctaatacagagtgtcaaaatgctattagacctatgagagggaaggctcatttggctgaatatattaaggctggtgatggcattgggggtaacttacacaaggctactcttttagctcaagctatggctggattaaaggtgggaaaaatacgccccatttttcaggctcttgctttaattgtgggcaatttggacacacaaaaaaggaatgtagaaaaggaaatcaaaaggcaaaactattaccatcaatcaacagaaaagtcccgatgtatacccccggtataagaaaggcaatccctggacaagacagtgtcattctaaatttagtaaagatggacaacctcttttgggaaaagggaagaggggcacacctcaggcccctcaacaaaccaaggcatatccgcacagtcagtgcccttacaaacgtacaacaattgtcccccgccacagcaggcagtgctgccatgtatctctgcagcacaattcccactccctacttcctggggagccaccaaagaaggtccccatgggtgttaggggccctttaccctcagaaaaagttggtctattgcttggagggtctagcttaaatttaaaaggtgtcactgtacatagaggaataattgattctaattatgccagagagattcaactagttgttagttcctcaactctgtggtctgtttccccaggaaaaagaattgctcagttgttgctgttaccttatacaaaactgggaaacagcactgtaaaaagaacaggaggctttggtagtactaactcagcagggaaagctgtatatttggttaattgaatgtctgataagagacctatttgtacagtaaccatccaaggaaaggactttgaagggttagtagatactggagctgatgtttctattattgctttaaatcaatggccctgacactggcccaaacaaaaggcatccattggtattgttggagtaggagctgcttcagaagtttttcaaagttccttaattttgccatgtctagggctggatggccaagaagggacgattcaacctattattacagctattcctgtcaatttatggggaaggggcatattgcaacaatggggtgctgaaatatctattcctatggatcagtatagtaataacagtaaacaaatgatgagaaaagtgggatatctcccaggaaaaggattaggaaagaatgaaagtgaccaaccagaacctttagaactaaaagggcgaacagatcgaaccgcattagggtatcatttttaggagcggctattgctgagcctccagctcccattcctcttgtttggttaactgccaaaccagtttgggtggagcaatggccgctgaaacaggaaaaaactggaggctttaaaagaattagtacaggaacaattgcaaaagggacacatagagcctactttctctccttggaattctcctgtttgttattaagaaaaaaatcagacggacgcggtggctcacgcctgtaatcccagaacttgggaggccgaggcgggtggatggcaaggtcaagagattgagactatcctggctaacacagtgaaaccctgtctctactaaaaatacaaacattagccgggtgtggcggcatgtgcctgtagtcccagctgctggggaggctgaggcaggagaatggctgaaccagggaggcggagcttacagtgagctgagatcgtgccactgcactccagcctgggtgacagggccagactctgtctcaaaaaaaaaaaaaaaaaagaaaagaaaaaatcaggtaactggagaatgttaacagatttaagggctgttaatgctgtaattcaacccatgggctcactgcaaccagggctgccctctccaacaatgattccaaaatactggcctctaatattgcttatttaccattcctttagctacccaagattatgaaaaatttgcttttactgttcccgctataaataacaaagaatcagcggataccattggaaagtactcccacaaggcatgttaagtagtccaactatttgtcaaacttatgttggaaaagctattaagccagttagagaacaatttaaaaaatgttatattatcaattacatggatgatattttatgtgcagctgacactagggaggaattaacactatgccacaaacagaaaagtctgtaactgctgcaggactaatcatagccccccataaaatccaaacttctactccctttcaatatttaggaatgaaggtagaacaaagtgctactaagtctcgaaaggttcaaattcaaagagataatttaaaaactttaaatgactttcaaaaattattaggagacattaattggatttgtccaactttaggcattcctacctatgctatgtctcaccttttttctgccttacaaggtgattctaacttaaacagtaaatgctccctgtccaaagaggcattaggggaacttcaattacttgaagaaaaaattcaacaagcacaagtgaaacgaattaaccctatgcagccattacagtttttagtttttcctactaaacattcacctacaggagttattgttcaacagaatgatctggtgaagtggctttttctacctcacaatacaaccaaaacgcttactctgtattcagatcaaattgctgtactaataggacaagcaaggctgcacacaacaaagttaatgggatatgatccaaatcaaattacagttccagtaaacaaacaacaaattcagcaaacttacattaattcccaggaatggcaagttaatttggcaggttttgttggcattcttgataatcattatcctaaatctaagatatttccatttctaaaattaacatcctggatattgccttctattactcaaaaagcccctaatgaaggggccattactgtttttactgatgggtctagtaatggataagcctcatttgtgggacctcaacaacaagtttttcaaactgactttgcttctgctcaaagggctgaacttattgctgtaattacagtactgaaaactttaaaaaagccagttaatattgtttctgattcagcttatgtggtgcaaatcacacaaaatattgatgaacaacttaatcttttatttcattctttacaacaagcagtacaacaaagacattcccctttctatattactcatatgagagcacatactaacctccctggtccttttaacttaatcaaagggcggatgcactggtttctgcagcttttgccgatgcacaaacgttccattccttaacccatcttaatgctgcaggcctcagaaaaagatacggcttatcctggaagcaggttaaggagattgtaaaacacttttctgccggtgaagtcctgcatctgccacatcagggagcaggagttaaccctagaggtctatctccaaattccatctgtcagatggacataacacacattcccacttttggaaaattgtcctttgttcatgtttcagtagatatttattcacattttatctgggccacatatcaaacaggggaagctacagctcatgttaaaaaaccttttttttgctttgcagttatgggaatcccagaaaaaaccaaaaccgataatggcccagagtattgcagcaaagccatggctgcattttttttttttttttttttttttttgagacggagtcttgctctgtcgcccaggctggagtgcagtgaccaatctcggttcactgcaagctccgcctcccgggttcacgccattctcctgcctcagcctcccgagtagctgggactacaggcacccgccgctgcgcccggctaattttttttgtatttttagtagagacggggtttcaccgtggtcttgatctcctgacctcgtgatccgcccgccttggcctcccaaagtgctgggattacaggcgtgagccaccgcgcccagcagccatggctgcattttaacagcagtgaaatattactcatactacaagtattccatataactcacagggacaagagatagttgaaagagctcattgttaacttaaaaactcagttacaaaaacagaaagagggagaccaggtatataaaaccctacatatacaattacacctcgctttattaacattaaattttttaaatttacaaaaggatcagcccatgacagcagctgaacaacacttaacaggacaaaaggaaaataaaaatgccagacaagatatacagtggagggatgcacatacaaagagttgggaaaaaggaaaaataattacatggggaagaggatttgcttctgtctctccaagtgacaatcaggtgcctctgtgggtgcccaccaaacatctgaaggtctatcatgagccacaccaggaagagaggactctgggaagagccagaactccctatacgagtgatggcatgaatgaaaatctcagagacaaaggaaaagaccaagaatactcaccaggcagaccctccaacatggggacaaatcaggaaactggcacagatgcagaggacaatctgagagcacagaacaaatcaaaaacaactagtaacctaatggtggctatgatggtggtacttactgtggcggtaagcctccctactgtaaaagcaactcaaaattttacttattggacttatgtcccatttcctcctttaattaggtctgtgagttggatggaccctattattgaggtgtacaacaatgacagaacctcgatgcctgagcccatagataacagagtgccgatgcatcctaatgaggaagggatgaaaatgaatatatcaataggatataaatatcctccaatatgcctaggacctgctgctggatgcttacaaattggcacacaagtatggttggcagtaatccctggaaaaaataaatcacaggctactttatatatgatttcagggcaaagtttaaaatataaccattccagccctgaaactcagcagttctgaccagacaaactcgaatgtaaacaaaatagagtttggtttgaaggtgtggacgcttggcattggggaaattgtgtagcaagtaaggctggggtgctacaaaataattcctatggaatcgtcattgactggtcccctaaggggatttttaagaaaaattgcactgaagggccttcttataaaataagctgatggactcattggaaagagaaccatacacggtacattcagacggaagctgatgttcctattatatggagccctggtggcattatcacccctattccaaaaatgatatctcctgccataggacaggaacattcaggattatggaaattagctatggctcaaagttcaatcacaatttgggagggtaaatataataagtataaaggggagggaggtaaatataaatatgttctctcttttctttctaacaggaccttttggaatcaaaattgtgtccgaccaccttttacgttagcagtaggaaatattactcttctttttttttttttgagaccggagtctcgctctgtcccccaggctggagtgcagtggtgtgatctaggcccactgcacgctctgcctccctggttcatgcctttctcctgcctcagcctcccgagtagctgggactacaggcgcccaccaccatgcccggctaattttttgtggctttttatttatttattttttttagtagagacggagtttcaccgtgttagccaggatggtcttgatcttctggcctcatgatccgcccgccgcagcctcccaaagtgctgggattacaggtgtgagccaccccgccaggccggaaatattactctttacataaatacccgttttatcacctgccaggaatgtcacttgtttacttgcattaacgacatcttgataaaaatcaaactatcttgttaattagagccagagaaggagtttggatccctgtgtctctaaatagaccatgggaggcatcaccgtccattcacattataactgagatccttacaaaactcttatcccgttcaaaaagatttatagttgctcttatatttgctataattggcctcactgcagttaccaccactgctgcagtagctagtgtggctttacactcatctgtgcaaactgtcaaatttgttgataaatggaaaaagaattctatgaaattatggagctctcaggcccaaacagatcaaaatatagttagtcaaattaatgatctccctcagacagtaatttggatgggggattgcatcataagtttagaaactagaattcaaatgcaatgtgactggaatacatccgatttttgcgttactcctcatagttagaatgaaacagaacaccaatgggaaattaaatgccatctagtgggcagagaggaaaatctcacccttgatattgtaaaagtaaaagagcaggtttttgaagcctctcaggctcacttaaccctgctccctggaactgatattttcagcgaggcagccaatgggttgtctgcaatcaattctcttaaatggattaagaccactggaaactctacacttgtaaattttgttctaataattatgtgcttgtgctgtctccttttaatctacagatgcggaagccgcttctggagagaaagccgctgccaagaacaagcaatgatagctgtggcggttttgcaggacaaaaaagggagacatgttggcagaagagctgaggcagggctcgtttttctgacataatgtaaaagagtcttggaacatgtcctgggtccagggtctaaaacccctcatgacctttggaacaccaaactctgtgccaaagggtggaaggctgccctgccgcagtacaatctaaacccagggtatgaaaccccttgtggcttggagagaacccagggctcagggcataaaaccctctgtagcctttggagtgtgtccagactcactggccccttgcactttgttctcccaagatcataaattgattgtatcttgaattagaagaacctattctcccttatctcaagtagcagagcatatgctaagccatcacagctacgcttgatgcaccgctttctacccccacatcctcacctgtctgcccccacatccgcacgtcctctccacctgcttctttgtttgattaccaataaatagtgtgggctcctagagctcagggcctttgcagcctccatactggcgttggcccctgagacccaccctatgtactcttgtcttgtctcattcctttgactctgccagacttcatagccccagtgaccaggtgttgggtctgatcaccccaacactttgcctccaccggtcccatgccaccctcgctttaagcccctgcctttgaaagcaggtcatgttcactgagatgctggacactgcaggtatctgtccctgggacagcagggacctctgaagcttctttgtggcctggtttatacttttttccatcttgtggtttttctaatggactttcacggattttgtaatctcgtaactttccaagctccatcacttcctaaatcttaagaactgtaattgacagtttaaattgaaggtgctgtttgtagacttaatacccaatgaaagcccaggcatcgccgggagtggtggcccacgcctgtaatcccagcactttgggaggccaaggcgggcggatcacctgaggtcgagcgttcctgactagcttgatcaacatggagaaacctcgtctctactaaaaatacaaaattagccaggtgtgattgtgcatgcctataatcctagctactcgggaggctgaggcagaactgcttgaactcagggggcagaagttgtggtgagccaagattgtgccattgcactccagcctgggcaacaagagtgaaactccgtctcaaaaaaaaaaaaaaaaaaaaaagcccagccatcatgaagaatcctcgaatgttctctgaagaaaatgatgctgggggctgggtgcagtggctcatgcctataatcccagcactttgggaggccgaggcatgtggatcacctgaggtcaggagttcaagtccagcctgaccaacagggtgaaaccctgtcactactaaaaatataaaaaagtagccaggtgtggtggcgggtgcctgtaatcccagctactctggaggttgaggcaggagaatcattggaacctgggaggcggaggttgcagtaagccaagatttcaccattgcactccagcctgggcagtaagagtgaaactgcgtctcacacttgatcttagccaaaaggctgagaagcactgaaccaaagccactgcgcccggctgggaaagttcttctttacagatttatagttcttctttatagattctttcttgctaagtgttgaaaagataactataatcatctaaagaggattaattcatcacttaggcaaagtagaggttagcaagaggaagttacttctcttagagtatgtgattcaaaggaaaaaattgctacatcaaatacacaccgactggctaaacatttctaggtacgtatcaatttctatgccactttcagattcaacacaatgaggaaattactggtgtaataaaaataacaaacattagattgatgaagcacggtaaaataatttcaaacaggaaagatgtatgaatcttttgtacaaaaaaatttcaacatataagttgcatacaagcaggaagatttaacttcataagagaattaacaaaagttgtattaattcaagacaagagcctgcagagactaaaattgcttagtactgaaagttttgcctatataaactgtagtttatgaagaaaaaagttttgttttttttgaggcagggccttgctcttttgcccaggctagagtgcagtggtaccatctcagctgattgcaacctccatttccgaggaaggctccttaatttcccaattataaaggttttgtgggaacataattgggtgtaataaaataaaaatttacaccacaagagacagacacatactcttcagggtgtatggtcataatttgtttgaacgagcccttttaaacttctagatatcattgaaactcctatgttgattaaaaatcatcaaagatctttccagtgagaaggatgaaaaatattactgagaatgaagtatcactatttcatgtatgtgcctgtatgtgcttatataacatgctgtaatacaaggtgacatttaggggctgagactgttaacatctgactgtaccttgctatttgtaacttacaatcttattcacatttctcaagtgccatgcctttaggtgcctatacatcatgctatcataggatttctagggataagccgagtgccgtggcagatgcctgtaatcccagcactttaggaggctgaggggggtggatcatgaggtcacaagtttgagaccagcctggctaacgtagtgaaagcccatctctactaaaaatacaaaaattaggtgggcgtggtggagggaacctataggcccagctacttgggaggctgaggcaagagaatcacttgaacctgggaggcggaggttgcagtgagccgagaccatgccattgcacttcagcctgggtgacagagtgagactctgtctcaaaaaaaaaaaaaaaaaaaaatttagggataatatctaagcccatataacctgctgttataaaaggtaacatttagggattgagatttttttttttttttttttttttttttgagacggagtctcgctctgtcaccaggctggagtgcagtggtgcaatctcggctcactgcaacctatgcctcccaggtttaacgaattctcctgcctcagcctcccaagcagctgggactacaggcacccaccactatgcttgggtaatttttgtatttttagtagagacagggtttcaccatattgtccagggtggtcttgaactcctgaccttgtaagccacccacctcagcctcccaaagtgctgggattacaggcctgagccaaaacacccagctgagattcttcatatagctgattatcttgccatttctaacttacaagctttatccacatttcttaaccttttgtttcactaaatgggacaggaagttttaactcttgtatccatgaagcatcttagtaaaataacagatattccatttgcaaattatgctccccaaaaaacacaaacacatatgtaaaaaatgttataaagacattaagtgtccactcaataactttgattcaaactatcttcatgttcttcacttcacaagataaagctcttaaaatggactttgtgaggttccatgtgtttggtcagtcatgagaggaagaataattcagagtgagaggaaacaagagagattctaggcagccctcagggaagctgaggaggtggctccctgcctccgggtccctcagaatgtcccatctccctgtcagtatcagtgtcccagataatcttcttctgactgggacatttcccaatttgggaacagtggttacttgccaaattcacatttacggccaaaactgtggctacagtgtcgacattcatgcaagtggggaaatgggcatgtggcccctgaaaaaagattctggattccataatctcaccttgctggcaagaaactaccatttcagcagaaagtgcaatgacagtgtctgcacagggactggagattatctccagaaaagagcttggagtgaggaaattagttaatgtggatgaatgacgttacccatggagaatgaagtaagtagctagaagacaaaagcctcagaacacataaatctcaacgggtactgagtagaggactcggagctctgaggtaattggagctcatggctatcccagaacttggataacataaagttcttgtttctacaaagtgtgtatcctttccatatgtgagaactctgaggaaatacaaacttggaacaaaagaaatagtaaggtaatcttagaaagatgttgaatagaaagcaagctacggtgacatcttaactgtttcactgcccagcaatctatacgtattgtcacttggggacacttatgattccacatgaagtggataaccagctcatagctcttgtggtactgaaaaccaagtatttggccgggcatggtgtggtgtactcgtaatctcagctccttgggaggctgaggtaggagaatcacttgaacctgggaggcccaagttgcagtgagccaagattgcaccactgcactccagcctgggtgacagaatgagactccgttccaatgcgaagtctcttaagaccaaggagagcagacattctgatgtttcccagattgacagcactcataaggcctttctccagtatgaactctcctgtgtttaatgagacgggatgtttcagcaaacgatttcccatattcactgcactcataaggcctttctcctgtgtgaactctgatgatgaaggagggtagagcttcgctgaaatgtttttccacatttggtacattcataaggcctttctccagtgtgaattctcctgtgtttaatgagactggaacattcagcaaaggattttccacattcactgcacttataaggcttttgtccagaatgaactcttttatgaacatgaagcgcagagctggaaagaaatgatttcccacattcattgcattcatacggcctttctccagtgtgaatcctctgatgtatagtcacgcagttcttattaccaaataatttcccacatacctcacacgcatatggcctttctccagtgtgaactctctcatgaacgagaagatgatacttcctgttaaataatttcccacattccctacaattgtaaggtctttccccagtgtgaagtctctggtgttcagtgaggtgggatctgtacctaaatgatttcccacattccttgcactcatagggcctttctccagtatgacctcgctgatgttgaacgaggttgcccttttgaccaaaagattttccacattctccacacttgtaaggcctttctccagtgtgaacacgctgatggttaataaagcagaacttctgacgaaaagatttcccacattccccacagtgataagctctctctccagtgtgaccttgctgatgttgaatgaggttacccttttgaccaaaagatttcccatattctctacactcataaggcctttctccagtgtgaacacgctgatggctaataaggctgcccttctgactaaaagatttcccgcactcctcacagggataagctgtctttccagtgtggactcgctgatgttgaataaggctgctctttcgactataagatttcccacactctccacaatcataaggtccttttgcagtgtgatctcgctgatgattactgaagctgacatatctgctaaaggattttccacaatcactgcacacataacatccatctctagtgaaaagtttctggtgtggaataactgagtgtttggtgctgaaggcttttgtgcgttttccacaactgtaattagtttttccctcctgaaagggtgggccatgcatagtttcactgtctgtcttctctacagcagctgcttcttggcacaatcctgaactgggcagaacgtccttcccaaactcgcggaagacaaatggctcctgtgacaccctgagcttacgtttctttacaaacgatgcttctctgacactctttctgtagaatttctctccaatatgctgcttctggtgctgatgaaggtatgcagtgtcatccaagttttttccacatgctccactcctgttcagcttctgcttgtgatgagtttcctggtggtcagcaaagtgaaaaacatcctccaagatgaggccacacatttcacaggggtgagccttcttaggagaaacacctgccctaggagtcctgctctgagactctctttgtacagaaattctctgcttacaaggtgcctcctcatcttttgatccacaccaacaacctgagagcaagaaaatgctggtcaagtgcaaagtacctctgacgggaaggcacagcccacccacaagtacgtctcacaaattgaggaattaatctatagaaatatttgcaggaacacaatgttggcttcaagttgaagatggggctgctggccgggcgcagtggctcacgcctgtaatcccagcactttgggaggctgaggcgggtggatcacctgaggtcagaagttcgagaccagcgtgaccaacatggtgaaaacccatctctactaaaaatacaaaaattagctggatgtggtggtgagcgcctgtaatcccagccactcgggaggctgaggcaggagaatcatttgaacccgggaggtggaggtttgcattgagccatgatcgcaccactgcactgcagcctggataacagagcgagactccatctcaaaataataataataataataaaaagaagaatgagctgcctagcattactgggctataaaggtcacagaatccaggaggcctcatgatgtaaagagcacaagcatacaggcaacacagggagtagaggcagggtccacagctccttcctctaaacacaagttgtgtacgggaccttatctcctaatgacatgtgagtgctatgtagaagcatatggactgggcgcggtggctcatgcctgtaatcccagcactttgcaagggtgaggcaagtggataacctgagttcagtagttggagacgagcctggctaacacggtgaaaccctgtgtctactaaaaaaagaaaaaattagctaggtgtggtggtgcaggcctgtaatcccagctacttgggcggctgaggcaggaaaatcacttcaacctgggaagcagaggttgcaatgagccaagattgtgccattgcactccagcttgggcaacaagagcgaaactccatctcaaaaaatataaatatagaagcatatgtcaagaccaagaaaacatgagtacaacacagcagagggtggtcatggatggtttaacatagggcatacacttcctaatatgtaatcgatacaccaatatcagagacaagtgcagatgaaagcacaagaaaaatgggtgagatgtgagtattagtgctggggtggatatcacagtagaagtgaaaaggtacagaactaacacgtgtgaaactctcaacaatggggagaaaaagacaaatagtgtgtgcctactcatattgccacaaaaacacttggcaaatataaatggtttctggtatgatttggataaacccctgaagtcatgccctcccccagcatggcactcctgagggacaggctccctttgagcctatcgtgatgagcctgaattgaaccacatcttgtcaaacatggaggtctctccatctcacacccagtacataggacccgacgatgtaactatgaagggagagacagcagagatgaacagccaacactagctcaggacaactaagcacctgacagcccacaggagagtaaggtaagtattacaaaagaattcctaagcagggtcttgcaagaagagtctatggtctatggtctatgtaggtagtgacaatgtcaatgaaggcaattcttggcacagggaggcacaaagcattgtcagatagaggaaggaagtgttaatagaacctgggcacacaagagctaccgatttggacagtcacctgacagccagagagcaggcaaagtggatacacttaggtgcctattagactcctgactctgactccttccctgggagcctggagcaaagcaggtgttggaggtgcttaaggaaaggaaaaggcaatacacacaacttacatagagaagtgtagaaggaacctgtgtccaggctccttaagtgagaaagacagtcctgtcaatgaaaaacaggggaacagtaacactagctcaggtcacaaaggtgagcgtgagcaacttacccagcgaggatatgagagccaggttctctagcatcacatcacggtacaagcacctctgagcctcactaagaagacaccactcctcctgggaaaagttcacagccacatcttcaaaggtcacagtgccctgctatgatagtgacagatgaaaccacaaacagcccctctgctgaggtaccacaacccacctctcccacacacccacacttgcccatcctcctcccaaggtccccaacatagtgttgaaactatgtccactagtgcctttgtctcttcatgggcccactggtcaattgccatcagcaataagcagtaagtggacaaataggtatccatgctgaggtcctgacataaaaaggtccatccccttctgaatagcgatatccaagctcatgtaaagcccagggcagctgcctgagcccattggacaaactccctctctaaatatacatcattctttatactgcaaagacacatccccatggccacccctacctgagttttccctaccatcagcctctctctggcatccccacaaatagaactttgttttttggggttttttttgagacatagtctagctctgtcacccaggctggagtgcagtggcatgatcttggctctttgcagcctccgcctcctgggttcaagtgattctcgtgcctcagcctcccaagtagccgggattacagccacgcaccactatacccggctaatttttgtatttttttttttggtagagagggggtttcaccatgttggccaggctggtcttgagctcctggtctcaagtgatccatccgccttggcctccaaaagtgagattacaggggtgggtcactgcacccagcccccacaaataaaattatttcacaagatgaagagggtataacggcccatgattcccttgggaatatgcaatggtttgtttccataactctgctggtagggatggaattgaaacccaccacaaaatataacaacctggaaccctgccttatcaccttgataaaacgggctgttaggctaggatacattattcaagagagcagagtgggaatgagatttgtactcacaccttttaaggttgtcccactttcacaagatgtcaaagtgacacatcatattgggccttcaattctggccttataccaaaatgtggataagcatccagactatgcttgacaaatacaaataggatccaatattaacacagaatttccatggtttacaatagcagtggtaatcccaaatcatcctgtgaacgtctcccggaatgactccatagccacacagaaccacatatggcttcagatatccatggacctatttcacttttgtgctgcaccagctgagacctcagctgtagcaaccctcctctgtccatctaatgctgtttaaagcccagcccctggatttgtgaaccaaaccacatctactatcacagatgagcatatttttcactgcccacatgcaccaagctgaatgaaactctccaggcactcccaaagtcatctcaaaacgtttatgaatccagacagtgataaatagttacaacttggcaccaactcaggcagaagtgtcatcttccttactcctatgcttctgcatgcatctatctcatctattctctcctcggatgtctatgtccccttccaaactctactgtctgatacatcctgccatgatgttcactcacaccctctcaggtgtttaggaagcccaataacatcactcagggacgtaagtaagagatccactcctcagcctgtagtcacaccttcctggcccctgaaaagatttaccaccaaaatctgaagcatgtcctcctaaatggacccataactaacttactgaagttcacccattagctttcaaatattggatgtctccagtatcaacaccctcccagataccccatcctgtatgtctagttatccatttaatgccaccatttattggtcactgactcttcatatggccaaaacaacactcttgatatccacagtcaatattatgtcaataccaacttcatgtcagctgatgcagcgtccatggttacagctgctaagatcaaaaaccttgggctcatgcctgattcctctttcatgcccttatcatccgcattagaaaacctagctgtctgtcaggcgtgatggctcatgtctgtaatcccagcactttgggaggctgaggcaggcgaatcacctgaggtcaggagttcgagaccagtctggccaatatgatgaaaccccgtttctactaaaaatacaaaaattagctgggcgtggtggcaagcacctgtaatcccagctaccttggaggctgaggcaggagaatcgcttgaacccgggaggcagaggttccagtgagccaagattgcaccactgcactccagcctgggcaacaagaccgaaactccacaaaaaaaaaaaaaaaaaaaaaaaaaaagacagaaagaaaacctagctgtctctttacaaaaagtgaatcctgtatccagactcatgtgatttgccacgtatctgatccactaaccctcacctggattatggcaggagccttatctctgacatttcttcctcttccctcaacccatagtgtgtgcaccaaggtccaaccagatgaagccggtagccagtagaactgtggtaatatcaccttctgactttgatcctttttatctctaagcatttcacaacctggtagcaaatcctgggttaatcttacaagagtgtttacactggctgacagaaatgggcatacttgcatataacctgccatggcctcagtatcctgtctttagagattctccagggtcctcggatcaaaggactgaaaaaatggcacttaagagtcccagcacaccacaagctagagaacctgtggatggggtcaagaccaatgaggggattgaacaccctccacttccctgtgtgggttccctaagtgcttctgcagccaggagtgcctgaggggagaggcagacattacaaacatgtcacgggatttgataagctcaggcctccctgaaccctttcttgtccctggaaccaggtaaccctacggctggttgtctgacctgcttgtctcagtgcaaaatgtcatctctaccacctatgtgagctacaaaaaggattcaacctcccaagaccccaaagtcttcatcctctctacgatattcttcctttgaatgtcctttgggaaaccttaaaagcctggatttggatcatgtccctcctttattcaaaactctccatggcttctagcgtcctcaccttgaatgcacagccctcggcctgcttactcttccagggagagctccacctcacactttgttccagacaggttccatcctcccggctccgtccatctccaggccattgcctgcgcccctccctgtgcttgttgctctccccaccgcatcccacgggtgtcagaaacaggtgaaaccgtctttgcaaaattataactgaggaaattatgacagtgaaagaaatcagaccttactgactccgtcttgcttccaacctttcagctgtccttgttcattcctgggtataggctgaattaacttagggaaggaattcagttcatggtttcactctgaaacaaaattgataatagccctttcctgaaaagacccccttcttgcctggagaacagcctgcctttgcaggactaacgaattagctacaaggttagaaattaccgtttaggggtcatgcagcttctgactccaagagtctgaacctccccaagttgctcctgaagataaatcactattgtaaaacctaagatcagtgcttgaggtattttgcagatcctgcactggatggatcagctgacaacacacagaccggtaatctgggtcaatcagttctgccatcccacccagaacagaaaacagcatgaaaaactcactttaaccctctatgaatccatctcaggtcccaacccttaccgccaaattaatgttgaaaactctgatcccggaatgctaatggagactgatttgagtaataataaaactcctgtctccagaacagcctgacggctctgcgtcaattactatttctccatcgcaattctccagtcttcataaatcggctctgtctaggcagctggcaaggtgaacccactggacagttacacagggacccccactggacagttacacagggacccctcctgcgagcgcctcagtgttcctacgccgggtaccggctacagacccgtgagcaggagccgctccctcgctggtttaggacctgggtgacgatggggtgacctgagggcacagaaggcgccacaattacctgagtcgggcgcctcggcgcagccgctgccatcggactacttggggaagcacggcccgggagcagtggtcgccgtcacggggctgcagagccgcctctgggcaccgaggacgattcctctccaccttctaggttcagtcaccgcggtccccccccagcactcaggggccacaaactggggaaacacccgcgtcaccgatacacagccgctactagagaccccggaagtctcagccttacgttacgtgcacacgtggaaatgccttctttccgagtgctcattggctctgaccggctgtcgtttaacgcagagctttctgggtaatgtagttccccactttccatggcgctaaaaagagcgatacccagagtccatctgcaggaaaagcccgccatcaggtcaggggttctccttaaaaagcgcacccttctggccgggcgcagtggctcaagcctgtaatctcagcactttggaaggcggaggtgggcggatcacgaggtcaggagatggagaccatcctggctaacacggtgaaaccccgtgtctactaaaaattcaaaaaaaaaaaaagttagctgggtgtggtggcgggcgcctacagtcacagctactctggaggctgaggctggaggagaatggcgtgaacctgggaggcagagcttgcagtgagctgggatcgcgccactgccctccagcctgcgcgacagagcaagactctgtctcaaaaaaaaaaaaaaaaaaaaaaaaaaaaaaaaaaaaaaaggcgcctttctagggcagaggaggggtctcacctagccttagaagccgtattgagattcctggagactagtgtctgtaactaatcactcaagaatctggaaaaatactgtttcagatttcggggagcgcaaggtaaataatagggagctcaagctaaaactattatttaggattctcctaaaggctaaaaatccaaattaccacaccgtttgaaacagtcgttcagtcgcaaaatacctgcactggaagcagaggctgataagcgttgttgtgttataatgtgtctgaaggccctcagaagccttagagtgcctaaggcaaatgaaggaagttagggatgtgctcccctatagcaggagtgcaaagctgaatctctgtgattcctacagaaaacaactctcctgctgatagaatctgtgaaaggaaaatcttgtggcctcaaaattactaagctaaagggaaaagtcaatctgggaactgctcagggcaaacttgcctcccattctattcaaagtcttccctctcctcactgagatagatgcctattctgattgcctcctttggaaggacttatcagaaattaaaaagaatccaactatttgtctctctacctgtctacctgtgacctggaagtcccctccctgcttcgagttgttcccgcctttctggtcggaaccaatgtacttcttacatatattcactgatgtctcatgtccccctaaaatgtataaaaccaacctgtaccccaaccaccatgggcacatgtcgtcaggacttcctgaggctgtgtcacgggcatgtgtcctcaaccttggcaaaataaactttttcttttatgagacggagtctcgctctttggtcaggctcgagtgcagtggcgcgatctcggctcactgcaacctctgcctctcgggttcaagtgattctcctgccttagcctcccgagtagctgggagtacaggcacgtggcatcacgccaatttttgtagtttcagtacagacgggggtttcaccttgtttaggatggtctcgatctccctcgtgatctgcctgcctcaccctccaatgtgttggggttacaggcatgagtcaccacacctggccagcaaaataaactatttaaattaactgagacctgtctcaaatttggggggttcacaaatcattatagcgttcaattaattgaacaacactttttcccacttagtatcctttacttgatattctaacttacattcaactccttttagtaatttgacatcagtcttataaagaacaataaggctgggcacggtggctcacgcctgtaatcctcgcactttgggaggccgaggcaggcggatcaccagttcaggagatcgagaccatcctggctaacatggtgaaaccccgtctctactaaaaatacaaaaaaaaaattagccgggtgtggtggcacacgcctgtagtcccagctactcgggaggctaaggcaggagaatcacttgaacccgggaggcagaggttgctgtgagctgagatcgcgccattgcactgcagcctggcgacagagcgagactctctcaaacaaagaaacaaaaaacaataaaataaatggtatcttggtagtagtgatggctacagtctgtaaaaagtaaagtacaggttcctcttcaaagactttcctcccatctaattaggaataaatagtaacttctcttagaagcaaaatttattcaaagacctgtgctaacattcttaaatatcttctagccgtaattaaaaaaatccatgtactttatgttcttagctcccacaatttagcctaaatatttgccctggcatgtttacactggtccaagcaagcattgtcatagcctgttcctcttatttgaaggtgtttttgcctttcttagcattccataagttaattcctccttcgttttcctcttgcctttgcctcttttaaaaatgttctaagttgctagtcaatcaggacaaatacagaatgtgaatttgtatttagccagtggaaaccggacacagcagtaaggtggatgcgtcaggcaggttataaatgaccctgtctcctttgttcagtgtaatctcacagcaaaactgctggcgagtataccgtttctgcagaaagtaaaaatggccttgctgaggaaattaaatttatgttcaatgctatttctttctttctttttttttttttgagacggagtttcgctcttgttgcccaggctggagagcaatggcgcgatcttggctcaccacaacctccgtctcccaggttcaagtgattctcctgcctcagcctcctgagtagttaggattataggcatgcgccaccatgcccagctaattttgtatttttagtagagatggggtctctccatcttggtcaggctggtcttgaactcccgacctcaggtgatcctcccacctcggcctcccaaagtgctgggattataggcatgagccaccgcgcccggccaagtcaagtgctatttctttacggcactaaagaacaagcatttcaaacagtacttaaagttggtgctctccatctgttcatactgggcatttgtaaaagccatgagttcatgtcattgatgggaagtgattatcattgatttgagaggagggagtgttctgcatgaaaaattaatattacataagagaaacagttgtaaattgcaagatacaaaagcctattaatactgactaggtaggctgggcgtggtggctcacgcctgtaatcccagcactttgggaggccgaggtgggcagatcacaaggtcaggagatcgagaccatcctggctaagacggtgaaaccccgtctctactaaaaatacaaaaaattagccaggcctggtggcaggtgcctgtagtcccagctacaggggaggctgaggcaagagaaacgcgtgaatccaggagacggagcttggagtgagcggagatcacgccactgcactccagcctaggcatctcaaaaaaaaaattagccaggcgtggtagcaagtgcctgtagtcccagctacttgggaggctgagacagaagaactgcttgaacccgggaggcagaggttgtagtgagcctagatcgtgcaattgcactacagcctgggcgacagagcgagactccgtctctctcccgctcccccaaaaatataaaaagcaaaaaacaagaaaacattgactaggtaattattaaacagttttgacagaagtgggtctatggaaacatcagtagatggtgaaaaagcttaggacctcagagaaatgttagcaccaatgtccaagagattaaattatgctcagcacataattggaatggtcagtctgatggttttggctttaaaatgagattcttcttcttcttttttttttttttgaggcagagtctcactctgtcacccaggctggagtgcagtggtgcgatctcagctcactgcaacctccgcctcccgggttcaagcgattctcctaccgggtgtggtggctcatgcctgtaattctagcactttggggggctgaggcgggtggctcgcctgaggtcaggagttcaagaccagcctggccaacatggtgaaaccctgtctctactaaaaatacaaaaattagctgggtatggttatggtggcgcacacctgtaatcccagctacttgggaggttgaggcaagagaatcacttgaacccaggagtcagaggttgcagtgagcagaggttgcaccactgcactccagcctgggtgacagagtgagactatgtctcaaaaaaataaataaatacataaaaagatgcctcagcctccagagtagatgggattacagacatccaccaccacgcccagcaaatttttggatttttagaagagacgaggtttcaccatgttggcaaggctggtatcgaactcctgacctcaggcgatccacctgcctcggcctaccaaatgctgggattacaggcgttagccaccatgcttggtcgatcccttttgaattaagttggttcatacaatcctccatccaacctcatggcatgataggtaattttctcacaacggaatacttgttttctgaaaggagttgtttataggttaagcaaaaccaatttaagagctttcagcaaagtaatatgaaaagcttctgttaatttcgccaggtgagagacagggtcttactctgctgtctaggatagagtgcaatggggcaatcatggcccactgtaacctcaaatccctgggctcaaatgatcctcccacctcagtctcccacacagctaggactataggcatttgccaccatgcccagctgttttggtagagacagggttgtgctgtgttgcccggctggtctctatcatgcttgatccctaccctgttgacttcaacaaggatggcaccatgtccaagaactgaatgagagccagagctagaaaatgagacatagagctaggcgtgtggctcacgcctgtaatcccagcactttgggaggccaaggcaggcggatcacctgaggttgggagttcgagaccaccgtgatcaaaacgcagaaaccccgtctctactaaaaatacaaaattagccgggtgtagtggcacatgcctgtaatccctgctacttgggaggctgaggcaggagaatcgcttgaaccgggaggtggaggttgcagtgagccgagatcacgccactgcactccagcctgggcaacaggagcgaaactccatctcaaaaaagaaagaaagaaagaaaatgagacatagggtttattgaggacttagatacagggcagtccaggagcggcaggctggacaaaaaaaccactatcatttgaaagaagcatgcagtttatatagtattttcacttatcaccctccgcctagctcaaaacaaagggcctcattccaaggaacaggccaggggttcagaaacctccaggttggccactcctggatttcttcgtttggaacgctgaaccaacactcttcttagaccacagggtcattcttagggtgtgcttgagttactgctgtcagatatatctgttatacagtgtcgaactcctggcctccaggatgttcttgccttagtctcccaaaacactggaattaaaggcatgagtccctgtacatgacgagatgggcttttattaacctctttgttagtttcatcaatcgagaagagaggggagggtatgcaaaataaaaatgttagaaaatgggccacactttacaaattgagattatgtctccagttaaatgagttcccctattgctgtgtaattcacaagaaattctccaagagggagttaccaattcaacacatatttacccatgacttccacggtggctcttctgtaaggaaatgcttgaacccaaagagagaacatgcagatcataatcagttcatatttataatcttgggctggaggcaaatgcatacagtttaccaaatatgaaaaggtgaggtgggcaaagggaaatgcccttgagatccctgaaaagaaagaaaattcagttatacatttgatacttaaatatatgggacaccactttgttaaattgcaagaaaaaaaccaaaagcatgccaggcacagtggctcatcctgtaatcttagcattttgagaggccaaggtgggaagatcccttgagctcaggagttttgagagcagcctgggcaacatagtgagacctaatctctacagaaaaattttaaaaattagctgtgcgtggtggcacatgcctgtccctagcaacttgggaggctgaggtgggaggatgacttgagtccagcaggtcaaggctgcagtgaattgtgattgtgtcactgtactccagcctgggcaacagagtgacactgtctcaaaaaaaaaaaaaaaaaaagggccaggcactatggctcatgcctgaaatcccagcactttgggaggccgaggcgggcagatcatcacaaggtcaggacttcaagaccagcctgaacaacatggtaaaaccccatctccactaaaaatacaaaaattaaccgggcatggtggtgcatgcctgtaatcccacctacccgggaggctgaggcaggagaatcgcttgaaccctggaggtggaggctgcagtgagctgagatcgtgccactccagcctgggcagacagacggacattctgtctcaaaaacaaaaaaaattaagaaagaatcaaaagcaactttctaattcattgcagacgggagtatttttctatttagtgacacacttacctaacccatttatgccaagggatgcaaaatatatatatatatacatatacacacacatacatatatacacacatatatatacatatatacatacatatacatacatgtatatacatatatacacacacatatatacatatatacatatatatacatacacacacacacacacacacacacacatatatacacatatatatatattttttgagaccgagtcttgctctgtcacccaggctggagtacagtggtgcgatcttggctcacggcaagctccacctcccgggttcactccattctcctgcctcagcctcccgagtagctgggactacaggcgcctgccaccacgcccagctaattttttgtatttttttagtagagacggggtttcaccatgttagccaggatggtctcgatctcctgacctcgtgatccgcctgcctcagcctcccaaagtgctgggattacaggcgtgagccaccgtgcctggccactttcatgggtttctatgaaagtctaaacttaccacatggtacagtttaaatatgtatagtttacagaatgtcatttattccttattatggctttaaagaattgattcaaaagaaaaatgtgggctggacatgatggctgaggcctgtaatcccagcactttgggaggctgagggaaaaggattgcttgaggagttcgaggctgcagtgaactatgatctcgccactgtactccagcctgggtcacagagcaacaccttgtcttagaaaaaaaaaaaaagaaaaacatggattttctattatttttgacaaacatgcttgacaactatacaaaatctcctcatgtcctaagtgcagcaatgagtctctgcggcagcaaatactgataagccaggaaggccattttcacctgattaaattggaacactggttggtcacaaagaccacatcactggactaagagatctcccttctccctatcctcttcctcctgccaatgcaggaattgccttgaggtgaacagccgagaaagggtacaggaatccacgaatcctttatattatttcctttgacaatggcctcagctacacaagattcataattatggaggttctgagaatttctgtacctgacagtccaccacatacatagtaactgaatcaatgtggatgacgtgcattccaactctgttcttgcagtgtcctccactgcctataaatgcagaaattctataaattatgacttcctgttataatctcataacctgggacaccacactacgaaactctggatatcagagcacatggctgcattccaggacctagggaacagatttccctcagcagtactgagcagaatgcaatatcccttgtaaaagagaggaaattttcgtgtcgatctcagaagcatcagaggatgtcacaaacactgttcccttctcaggtttatctataaacccagaaattattggagtatctagtcaacaaataaggaccacaaagttctggagtctttggaggccttgggcagccatgaaaactatgccacaagtgaagagacagtatattctgtcatcatactgtcccctctgaggcacacaaagtctagtgatcccaacaaaagctgtctgcccctttatgacaccagaacccagttgtttccaaaccacccgaaagagtaaatacaactctcaagactgaaggaagcttaaacaataaggccttattcattgcacaaatcagagcaatgggaagcagaatgttctttggttggaacttaagagcctaaagaatcacatgagacccgctgggtgcggtggctcacgcctgtaatcccagcattttgggaggccaaggagggcagatcatgaggtcaggagatcgagaccatcctggctaacacggagaaaccccatttctactaaaaatacaaaaaaattagctgggcatggtggtgggcacctgtagtcccagctactcgggaggctgaggcaggagaatggcgtgaacccgggaggcggagcttgcagtgagctgagatcacgccactgtactccagcctgggcgacagagcgagactctgtctcaaaaaaaaaaaaaaaatatcacatgagacccataaggtccctgaaaaaggtagtccatcttttcaagctgacagaagacccctctggaccagtactgagacagatccatggtctcgctcatccgaaagaaatgagaaaggaatgacagctgagactactcaccaattcctctggccaacgaaagacaaccaaggtttacttccagaacatcatggggtgaatgaatgatgcacagtgaacacctgcctcgtggccgacataaaatggcttttgccagataaccgacatcatgtctggcaagggaacccggcagggtgaaaaatgccacacagctccaacataattgagtttatgcagatgctgaaggtatgtcaatttaggcagatggctccgtcataaggcatctcctccagtgttatgttttacaagaaataatatttcctgtacgtgtacagtgttttccttatgagaacaatctgttatccaatgacagaaggcagaaggctttctcacattcatcgcactcaagaggcccttctgcagtgggagctcttctgtatgtaataaaacaagacttctgcataaagaatatcccacgtttgtcacactcataaggtcctgatccagtaagaaccctctgatcaagaagatgcacagaggtttagctaaagaatttcccaaatttcttttcacttgtaaggacttctttctgtgtgaactctctgatgtcgaaggagagaagagcttcgatgaaatgattttccacattcactgcactcataaggcctttctccagtgtgtactctcctgtgttcagtaagactgaaggtttcagcaaaggatttcccacattcgctgcactcgtaaggctttcctcgagtatgaagtctctgatgtttaaaatgcgcagaccttcgagtaaatgtttttccacattccctgcattcataaggcctttctccagtgtgaactctcctgtgttcaaggagactggagaagaatttcccacattctctgcactcataaggtctttctgcagtgtgagttttctgatgtcgaaggagggaagagctctgatgaaatgactttccacattctccacattcataaggcctttctccagtatgaactctccgatgtcgaaggagggaacagctttgaggaaatgacttcccacattcactacactcaaacggtttttctccagtgtgaactctctgatgaacacgaaacccagagctgtcttgaaatgatttcccacattcattacattcatatggcctttctccagtgtgaactctctggtgttcaatgaggtgggacttgcccctaaataatttcctacactctctacactcataaggcctttctccagtgtggcttcgctgatgctgaatgaggttgccctttcgactaaaagatttcccacattctccacactcgtaaggtctttctccagtgtgacctcgctgatggttcctaaggtgtccctttcgactaaaagatttcccacattctccacactcataaggtcgttctctagtgtgaactcgatgatgttcagttagggtgcccttttgactaaaacattttccacattcttcacactcataaggtctttcactagtgtgacctcgttgatgttgaatgagattgcccttctgagtaaaacatttcccacattcttcacactcataaggtctttctccagtgtgaactcgttgatgtttaatgagagtaccattttgactaaaagatttcccacattctccacactcataaggtctttctccagtatgaactcgctgatgctgaacaaggctgcccttatgactaaaagatttcccacattctccacattcataaggtcttttcccagtgtgaactcgctgatgctgaacaaggctgcccttatgactaaaagatttcccacattctccacattcataaggtcttttcccagtgtgaactctctgatgattactgacgctatcatatttgctaaaggatttcccacattcccagcaataacattcctctctagagggaagtctctgctgttgaacaaatacgtgtttggtgctagaatgtttcatgcattctccacagctgtaatgagtatctccccactgaaagggagactcacactcaggtttgctgtttgacttctccccagtgtgagtggcctcctgcagcagtaatcctgagctgggcaaaaagtcctttccactctgaatgaagatagatgactcctctgacacatggaacttacacctcttcacaaacaatgcttcctcaacactgcttctatagggtttctctccaaggtactgattctggtgcggacggtttgaactatcatacaatttattcccccatgcctcacacctgtgcagtttctgcttgtgatgtgtcccctgatgatctgccaagtgcaaaatgtctcccaagatcgcgccacacatttcacaagagtgggccttcttgggagacacacctgccccaggagtgctgacctgagacactctttgtatagaaatgctcttcttagaaggtgcctcctcatcttctgatccacaccaacaacctgaaagcaagaaaatgctgatgaattcaagttaactctggtgggaaggcacagcccacccacaagcgtgtctgacaaaccaaggaattactccatggaaatatttgcaggaacagaaagttggcttcacgtggaagatgaggctatcattactgggctataaaggtcacagaatgtcggcctcatgatatgaagggcattagcatacatgcaacacagagaattgagccaaggtctacaattttttttttcttcttgagagacaggatctcactctgtcatccagcacagagtgcagtggcataatctctgtctcctgggctcaggtgatcctcccacctcagcctccacagtagctgggaccacaggcacaggccaatacgcccagctactttttgtagaggtggggtttcgccttgttgcccaggctggtctcaaactcccaggttcaagaaatccacccacatcggcctcccaaagtgctgggattacaggtgtaagccaatgcacctgctgtataactctttcctttgcaaaccacttgtctgcgggaaattatctgatgacatgttaatgctatatagaaggctatgtccaggcctaagaaaatgatttacaagacaacagctcttggtcagaacagtttaacaatttgcacacacttggccgggtgcggtggctcacacctgtaatcccagcactttgggaggccaaggtgggtggatcacgaggtcaggagatcgagaccatcctggctaacacagtgaaaccccgtctctactaaaaatacaaaaaaattagccgggcgtggtggcgggcgcctgtagtctcagctactcgggaggctgaggcaggagaatggcgtgaacccaggaggtggagcttgcagtgagctgagatcacgccactgtactccagcctgggcgacaaagagagactccatctcaaaaacaaaaacaaaaaccaaaaacaaaacacaatttgtacacacttgctaatacacaatgtgtatgccagtatcggacagcactctagaagtaaacatgagaaaataaatgggtgagatgtggagtccagagactggaagattcgttgggggatggacatcagagtacaagtgacaaggtgtacaactgacaaatctgatgctctcaagaatggaaaggaaaagacagaaacagtgcctactggccacaaaaatactagtcaaatagaataggtttctgatacgatttgaagaaaatctcgaactcatgccctcccaccaggtgccactcctcagtgacaggctccctctgagaacatcaggctgagcctggattcaactgcctcttctgcagcactgaggactctccatcccaccatcacaatgatgaagtacatggaacctggatgatgtaagtactaaggcaaagatagggcagaactggggcaactagcctctgtggcagcaaacagtgatgagccaggaaggccatttccacctgattaaattgaaatgctggctggtcacaaaggccacatcactggactccctatcctcttcctcctgccaatatgtgctggtagttttcagcaacagtggttcaaaacatgacaacacacaggaaaggaaactaattactaaaaacagaatttcttttttttttttttgagacggagtcttgctctgttgctcaggctggagtgcagtggtgcgatctcagctcactgcaagctccgcctcccaggttcacaccattctcctgcctcagcctccctagtagctgggactacaggcgcccgccaccacgcccagctaatttttttgtattttttagtggagacagggtttcaccttgttagccaggatggtctccatctcctgacctcgtgatccacccgcctcggcctcccaaagtgctgggattacaggcgtgagccaccgcacccggcctaaaaacagaatttctaaggagggtcttgcctttggtctatgtaggcagtgacaacgggagtgatggcaattcctgccacaggcaggcatcaagtaatgtcagctaaaggaaggaagtagaacctggacacacaggagtctcagatctggacaaagtcaaacagcaacacagggacatgcaaggtgaaatgcattagattgactacgagacacctgactctaactccttccctgagagtctgcagcaaagcacgtattgggactgctcaaggagaaaaggcagtacacaaacctcagacctaccaaccacaaaacctacccagagaagtggagaaggaagctgtgcccatggtcctgacatgataaaagacagtcttgccaatgggagaaaaggggaagggcagagatctattcaggaaatagggtagggtgtgaggaacttacccagggaggatataagtacccagttctccagcatcacgtcatggtaaaggcatctctgaacctcactaaggagactccactcctcctgggaaaagttcacagccacatcttcaaatgccacagtgccctgctatgatggtgacagatgaaaccacaaacagctcctatgctgaggtaccacaatccacctctcccacacccccacccccttgcccatcctcctcccaagatcctcagcacagaggagaaactagtccactggtgcctttgtctcttcgtgggcccactggtcactcagtatagccatcagcaattaagaagtaggggaaaaatagggatctatgctgtgcttgtttttttgtttttctgagacagagtctcgctctgtcacccaggctggagtgcagtggcatgacctcagctcactgcaacctctgcctcctgggttcaagcaattctctgcctcagccgcccgagtagctgggattacaggcacccaccaccacttctggctcatttttgtatttttagtagagacagggtttcaccatcttggccaggctggtcttgaactcctgacctcgtgatccacccgcctcagcctcccaaagtgttgggattataggcgtgagccaccgtgcccggctatgctgtactcttaacataaaagggtccaccccctcctgacagctaatgcctgtggtatatccgagctcacataaagcccagtgcagttgcctgggtccattagacgtactccctctctaaatacacatccttcttttttttctgagatggagtttcgctcttgttgcccagacaagagtgcggtggcgggatctcagctcactgcaacctccacctcccaggttcaagcaattttcctgcctcagcctcccaagtaactgggattacaggcacccaccaccacacctggctaatttttgtatttttagtagaaatggggtttcaccatgttggctaggctggtctcaaactcctgatctcaggtgatccacccacctcggcctcccatagtgctgggattataggcataagccaccacgcccggccttacacatcattctttagatagcacaggcacatgtcacggccagcccaacatgacatcccccaaccatcagcttcttttgagccttaacacaaattacagttttggtttcttttagtcaggttctcctttggtcgcctaagctggaggggagtagtgtgatcatggctcatggaaagttcaaaccccttagccccaggcctcagccttctgtggagatgggatcttacgtatgtgcaacatcaaccactttcttttaagagatggggtgttgctaagttgcccaggctgatctcaaactcctggcctcaagcaatcctcccacctcagcctcccaaagtgctgggattacagcatgagccttcaagcctggccaacaaagtattttaatccccttcttttccttctactgctctgagtgggattctccccttagggttatagtgttggggaaacaattgacacctgagactgtacatatgccatccacagcaatttcaaaatcaaataactcacagcctggcagagagggccacatgggggttgcactgtggacaacaaatggaaaccagggacagtgttatgcacactttgtaggatgaagagggtgtgatagcccctgatttctcaggagggtgccactgacttgcttaaataattctgagtagaaatggaattgaaacccagtacaaagtataataaccagaaactgtgcctgatcccttaatgaaaagggttgttaggccaggatacattatccaatagaacagagtgggaaggggatttgtgctcaggccatttgaggtcatacagtatcaccacacaccaacgttgcacatcacattggcctttcattttcggccttatgccacaatgtggctgacagaattcagagtatgcttggcaaattcaaacaggatccaatattaccacagaattctcatggctcccaatagcaatgcagtcccaagtcattctatgaaggccttcttgcatggctccacatccccacagaaccaggtggggctttagatatccatggccctattccacttctgtgttgcacttggtgacccctctacaatgacgactttcctctgtccacctagagtcatttaaatcccactcccttgttatggagaatggtctaagaaaagtggaaaacaaaagaaaaaaataaataaaatcccagcccatcagctgtccaccccaggcccaatgtctgtcacagataaccaaatttaccctgagcatgtatccaccaggccgaatgaaaacccccaagcaccaacaaagttttctcaaaatcttggtgagtccacagagtggtgaataagtaccagccttggcccaagtgtcatcttccttcaattatttctatgcttctgcttacatctcttatctattctacccttggaaagcctatgccccctgacaaaccatgttgtctgacataccctatcttcatgagcccttgcctccttctcctgtggcaatgtcagccagggacccaagcaagaaattcagccctcagcctgcaaccaccccttcctggcccccacaaaagatttaccatgaaaatttgaagtgtgtcaatgtcataatggaggctaaactatctcagactcttaacatggtcaaaacaacattcttcacatccccaatgaatattatacctactatgtgctcatctcagttgatgcagcttccatcactgcagatgctaagaccaaaaacctggtggtcatacctgattcccctttcatgccctcacagtctattagaaaatctagttaccgaccgggcttggtggctcacgcctgtaatcccagcactttgggaggccgagacgggtagatcacgaggtcaggagatcaagaccatctggctaacacggtgaaaccccatctctactaaaaatattaaaaattagccgggcatggccgggcttggtggctcatgcctgtaatcccagcactttgggaggccgaggccgatggatcacgaggtcaggagattgagactatcctggctaacacagtgaaaccgtctctactaaaaaatccaaaaaattagctgagcatggtgacgggcgcctgtagtcccagctactcgggaggttgaggcaggagaatggcgtgaacccgggaggcagagcttgcaatgagccaagatcgtgccactgcactccagcctgggcgatagagcgagactcccgctcaaaaaaaaaaggaaaatctagttgccattttacaaactgtgaatcttgaatccagccacagctccttactcattaatatggtccagtaaccctcacctgcattatggcaggagtttaaactctgatcctccttcctcctccctcaaacacagtgtgttctcttctttgcagccagatgatgcctgcagacaaatgggactgtggtaacatcacctcctcgccgccctcttgcctccccaccgaatttttacctctaagcatttcatgacctggtaccaactctgtagttaaccttcaaagtatgtttacatgggttgacagaaatgggaatacctccatacatcctgtgtcatggacttaggattctgggtttagggtttctccagtgttctcagatcaaaggactgaaaaaatggcaagtaagagtcccaggacatcacaagctagagaacatgtgaatggggaataaggccagtgagggaatggaacaccctctaattccctctgtgggttcctttttttgagccagagtttcgctcttgttgcccaggccggagtgcaatggctcaccgcaacctctgcctcccgagttcaagcaattctcctgccttagcctctgagtagctgggattacagtcatgcggcatcaccacgcctggctaattttgtatttttgttagagacggggtttctccatgttggtcaggctggtctcgaactcccgacctcaggtgatccgcccgcctcggcctcccaaagtgctgggattacaggtgggagccaccttgcccgaccccctcagtgggttctttacgtgcttttgtagccaggagtgtctgaggggaaagcagacgttacaaaggggatctgataagctcaggtctccttgaaccttttcttatcgctggagccaggtgacctcagactggttgacctgcgtgtctcagtgcaaaatgtcatctctaccacctatgtgatctatcaacaaaggagtcaacctcccagaaccctaaggtcctcatctcctctactatgttcttcctttggcctttgggaaaccttaaaagcctggacttggatcgcatccctcctttcttcgaaactctccatggcttctagcgtcttcacagcgaatacacagcccccagcctgctcttccaggagaagcttcgcctcacacgttgttccctacaggcgcctgtggaccccaggttccatcctcccgggtctgtcctccaggccatagcccgcgccggtccctgtgcctgtcgctctccccaccgcatcccacaggtgtcagaaacaaggacctctcccgcgaacgcctcagtgtcccgacgccgggtccgggctgcagacctgtgaacagtcgccgctctctcgctgcttcaggattcgggttaggatgaggtgacctgagggcagggaaggcacaattacctgagccgggagcctcagcgcggccgccgccatcccgagtacgcggggaaagcactgccgggagcggcgggcgccgttacggggcctaagatctgcctctgtgcagcaagaaggactcttcaccttctgggttcagacaccgcggttcggacccatagctccagcgcctctcacctcacaaaccgcagaaacacacccaacattaaccaaaatggtcgctaccagagaacgctgagaatcccgccactacgttacgtgcgcacacagaaacgcctttattctgagcccttactggttctgttgcgctgtcattcaatgtagagctttctgggtaatgtagttccccaggttccaaggtagtaaagctgccgcttcccaaaggcgcttctgcagggaagtcccagccctacctcagggggttcattaaagcgcgtacccttttagggcagaggatggtctcgcccctccttagaggccatattgagattcctggggaatccctgtttgtaactgaccacctaagtgtttgcaaaaatattaattcacatttctgtaaattcaagctcccaggcgctaaaaatactgtgaaggcccccaaaggctacaaatccaaattcgtgtatcactttatacaatcgtttagacacagaatgcttgcactggaagcagaggctgataaacattactctgttataattcacatgaatgcactcttgttaccggatagaatgtcttggctgtgagttgtccagttgttggcgcattgaacaaagaagtgaacaaaacacacaaaaaaagcaacgaaagaacggaccaatgaaagcgcagatttattgaggggaaagtacactccacagaagtggaatgtaggtgtgggagcaggcgaccaagcggctcaagaaccccgattacaatgttttttagggttttattaggttggtgcaaaagtaattgcggtttttgccatgaataagctagaattttataataccccaagagttctttaaaggcctccaatcctatgaaggactggtgcacaaccaatcagaggctgaagtggagacttctgtcttgttaccacaggagtgaggacgtggcctgtgtgctgcctcatcttgcctagaactagctgcacctgctgttcttttgcttatgccttcattcttggttaccctaattccctattctcctgcctcactctgaggcattagagttggtttttcagtctgccagggacaaaagagaactaatccagataggaccatgccaaggaagatagaggagaggctaaagaaagagtacaaaggtcaatcagtcgttcccatggaaaaacaactctcctgcttatatagtcaattattgtgtccaattcattcagcaaaacatttattcatgtaatatcccttacttggtattctaacttatattttcaactcattttaggaacttgaagtcagtctcaggtaaagaacaatgaaagagaaatctcagcttggtattggtaatggtggtgataatctccacctggagacactaggcgtatgttaaattatcgagcttgttatctttcctgggaagtgattatcatttgtttctcttgtgacagcggggagtgttctgcatgaggaactaatatgataccagaaaaacaggtgaaatgccagttacagaaacttattaccaacgactatctaataactgcgatgacagaaataggtcaattgaaacatgagtggatggtgaaaaaaatttacacttcacagaagtttttctttctttttttttttttttttttttgagacaaagtctcgttctgtcccagactggagtgcagtggcgccatcttggctcactgcaacctccacctcccgggttcaagcgattctcctgcctcagtctcccaagtagctgggataacagatgcctgccaccacgcccagctaatttttgtatttttagtagagacaaggtttcaccatgttggccagactggtctcaaactcttgacctctgacctgcctgcctccttctcccacaatgctgacattacaggcataagtcactgctcccagctgactttacaggtgtttgtttgtttgtttgtttgttttgagaaggagtttcactcttgttgtccaggctggagtacaatggcacagtttcagctcactgcaacctcctcctcctgggtcaagcaattcattctcctgcctcagcctcccaagtagctgggattacaggtgcctgccaccacactcagctaatttttgtattttcagtagacacaaggtttcaccattttggccaggctggccgcaaactcctcacctcaggtgatccacccgaggtggcctcccaaagtgctgggactacaggtgtgagccacctcgcccggcccagaagttttaacagtgatgtctacgaagagatggaattaaggtcagcatgtgattaaaaatgtcccccttgttggttttgtcattgagatttttttttctttattaaaaacattgaacaataccaaggtggagaaaaattgtgcctgttcacctacctacttgggaggcttagagggaggatcacttctgcaaaggagtttgaggccagcctgggcagcagagcaagactctgtctccaaataaataatttaatgaataagtaaaaacagaaggtgaaatctgcagtatagtattatcctcatagaattgtgtctccctttcttcattattctgtgtgtcaattatgttacaagtttttcatcttataggaaaaaagtcatagattctatacacatctgtactttttctcacttagcaatatggtttgaacaatgaaaagcttctttttcacttcacatttgaaatctgcttatctccacattctatttttttctcccctttttgagacagcgtctcactctgttgccaaggctgaagcgcagtggcatgatcaaggctcaactgcagtctcaacctctcaggctcaagtgatcctcccatctcagcattcaggagtaattgggactataggcatgcaccaccacaaccagctaatttttgagagatgtggttttgccatgttgcccaggctggtatcaaactcctgagttcaagcaatcctcctgcctcggcctccctaagtgctggcattataggattcggccactacacctggcctattcatctttttctgatgtagaacccactcagtgacagtgtaatcaagaatcaagaaagaggccagatgcagtggccatgcctgcaatcccagcactttgggagcctaaggtgggcagatcacttgaggtcaggagtttgagaccagcctagccaacatggcaaaaacccgtctctactaaaaatacaaaaattaggtgggtgtggtggcgcacatctgtaatcccagctactcgggaggctgaggcaggagaattgcttgaacccgggaggcagaggttgcagtgagctgaaatcgtgccactgcactccagcgtggacaacagagcaactccgtctcaaaaaaaaatagagccagaatacaatacacaagcaactgaagtatttcaacagcaaagaaaccctcaaacaatccaatttaaaaatgtcaaacgatctgaataggcatttttcaaaagacaacatacaaacggtcaaaaatatattaaaacacactcatcactatctgggaaatgcaaatcaaaaccgcaatgaggtatcactctccccgtttaggataattattatcaaaaagacaaaaacagacgctggcaaggatgcagagaaaagggaactaatggccaggtgcggtggctcacatctgtaatcccagcactttgggaggccgagctgggtggatcacgaggtcaggagttcgagactgcctgaccaacgtggtgaaaccctgtctctactaaaaatgcaaaaattagccaggcgtggtggtgcgtgcctataatcccagctactcaggagactgaggcaggagaatagcttgaacccgggagacggaggttgcagtgagccaagatcatgccactgcactccagcctgggcgacagagaaagactccatctcaaaaaaaaaaaaaaacccaacaaaatacaagaaaagggaactcatgcactggtggtgcaaatgcaaaccagtacagccattatggagaacagtattgaggtccctctaaaaactacaaatatgccaggcgcgatggctcacgcctgtaatcccagcactttgggaggctgaggcaggcggatcacgaggtcaggagttcgagaacaccctaaccaacatggtgaaaccccgtctcttctaaaaatacaaaaattagcaggggtggtggcacgcacctgtaatcccagctactcaggaggctgaggcaggagaattgcttgaacctgggaggcggaggttgcagtgagccaagatcacaccactgcactccagcctggataacagagtgagactctgtctcaaaaaacaaaacaaaacaaaacaaaaaactacaaacacaactaccatatcatccagcaatccccctactgggaatttatccaaaggaaagaaaatcatcacattggagacacatctacaccccgtttactgcagcactattcacaatagccaaaatatggaatcaacctagatgtccaacaacagataaatggataaagaaaatgtggtttatacacacaaaggaatactattcaaagaacagaatgaaatcctatcacctgaggcaacatggatggaaatggaggacattatttaagtgaaataagccaggaacataaacatgcacattcccactcatatgtggaagctttaaaaaaaaaaaaaaaaagctgggtgcggtggctcacgcctgtaatcccagcactttgggaggctgaggcgggtggatcacctgaggtcgggagttcaagactagcctgaccaacatggagaaaccctgtctctactaaaaatacaaaattagccggggtggtggtgcatgcctgtaatcccagctactcaggaggctgaggcaggagaatcgcttgaacccaggaggcagaggctgcggtgagccaagatcatgccactgcactccagcctgggcaaaaagagtgaaactccatctcaaaaaaaaaaaaaaaaaaaaaaaaaaaaaaagcctgggagacaaagcaagactgtcccccacccccacaaaaaaaagttgatctcttagaagtaaaaagtagaacagaggatactagaggctgggaagggtagtgggtaggcaggaatagacaaagattggttacaagctacaaaattacaactagacaggaggaataagttctagtgttctataccactacaggagaactaaagttaataatatataatttcaagttgttaggagaatggcaattgagactgactgttcccaatataaaggaatgacgaatgtttgaggtgatggatatgctaattactctgatcactctaagttataggtatcaaaacatcactatgtactccaggaacatgtacaattataatttgtccatttaaacacaaagaatttttttaaaaaaagaaaccatttggttttctgtgtggatatgagacaaagtagtatgtacacatataaacttatttgtataaaacaaaattcagagaacatatactaaatataaaacatggttattgaaaatacgtatttatttatttatgtctgtgaattttgcagggacacttctcagtccgtaacagccctatgtgtgttacctaacctttatcccttgtgaacgttctgatgttttaggaggttggagttgaaggtaaaaaattttccacagtcactacactcataaggcctttccccactgtgaattcgctggtgattagtgaggttagagctctggctaaaggattttccacattcactgcattcataaggcctttctccggtatgaactcttcggtgtttaacgaggctagagtggttactaaaggatttccaacactcactgcactcataaggcctttctccggtgtgacttctcctatgtctaatgaggctggagctctggctaaaaaacttcccacattcattgcactcataaggcctttctccagtgtgaactctctggtgttgaaggagcgtagagctatgagtaaatgatttcccacactccccacattcataaggccttgctccagtatgaactttccagtgtgagatgaggtaggatttacaggtaaaggattttccacattcactgcactcatatggcctttctcctgtgtgaactctctcatgtacaatgaggtcaaatttcctgctaaataattttccacattcatgacattcatgagatcttactccagtatgaactctctggtgttggaagaaacgagatctataagtaaacaatttcccacattcactacactcataaggcccttctccaatgtgaagtctccggtgtttaatgaggtgacagctctggctaaaggatttcccacattcactgcacatataaggccttgtaccagtgtgaactctctggtgtgtaataaggctagaactatggataaaagatttcccacattcactgcactcataaggcctcattccagtatgaattctctggtgtgtaatgaggctagagctatggctaaaggatttcccacattcactgcacttgtaaggcctttctccagtatgaactctctgatgtataagaaggtcatacttcctgttaaataattttccacattcatcacattgatgaggtcttactccagtgtgaattcttcggtgcgtaataaggctagagctttgcctataggatttcccacattctccacatgtataaggcttttctgaagtgtgaactctcaaatgatcactgaggctacagcttgtgctaaaagatttcccacattcactgcacatgtaagatctttccctaatgaggtctccctggtgctgaacacgtacatgtttgtagctgaaagctttcacacattctccccagttgtaatgattttttacactgtgaaaggccactgcactcttggttctgtttgacttctttctggtgtgagcagcctgttgctgaagaaatcttgatctcaccaggaaatccttcccaacctccttgcaagtgaagggcttcccagatacttcaaatgtgcagctgctcaaaaacatgtctctgcccccattgcttctgaagtgtttctgtccaacatgctgcttctggtgctgatgaaggtatgcagtaaattgtaattgtttcctacatgccccgtctgtatacagtttctgaccatggtgtgttccttggtgttcaaccaagtgcaaaatctgtctcaagactgggccacatatctcacaggggttggtcttctggggagaaggaagggccttaggaatcctaacctgtgacacccgctgtggagaagtgctctgctgataaggtgcctcctcatcccctgctccagaaccacctgaaagaaagaaaatgctggtgaagagcatgctgactttagtggagtggaggtagcccacagacaaatgtgcatccaacaaacccaggaactgagtccatggggttgttttcaggaccaaggtgttgggttcaagttgaagatagggctgcctagcagaactgggcctctaaagatcacagaactgggaagggctcatgagttaaaaaacacagccatgggatgagaaacatggagaagaggcaggatatacaactcattcctctagaacaattttcagtgagatctgctgtcctgctaacacatgcattgtgtacaggtatgtgtccaggcccaagaaaatgtgacaacaaaatagcggctgacatacgtggacacctcataacatattatgtagaggccaacactgaagagcactgcagataaggcagtgagaaaaatgggtgaaacatggagtccagagatgtggggattaaccccaggctggaagtaagagacgtagtaaccaggtggacagctgacaagcaagctaagtatcaagaatgggaaagaaaaggcagtaatgaggtttggccccaaatgtcattagcaccaaaatattagtcaaacaggatatgtttctggtatgatgtgaacataacccttatagaatgtcctcctttaggtgttagtccctagggccaggctccctctgagtccatcttgctgtggggaatcacagccatcctcagaaccacagggcctgtccatctgacccctacaatcaagaacacggaacttggaatatgcaagcacccaagaccagcccagaatgactctgcacatgatagcctacaggaaaaaaaataataatacaaggagaaattcagaggaggattttgcaagagccactcgtagtccacataagtggtgacaatgtcagtgatgataattgctggcagaggcaggcatgaggaagtgtcccctagaggaaggaagtagaacctgggccttgaggagcctcgaatctggacaatgtcacctggccaggagaggcaaacgaggtgagatccatgaggccgactataagaagcctaactctgaatctttccacatgaaagggaagcaggtgttgcttgctcaaggagaaaagcaggcaacatacaaccttagccctaccaaccgcagcacctgcccaggaacaggaagctgtgtcaatagtcctcttgtgaagacacatctgactctggggaaagggtaagagcaaaggctagctcggggcatagaggtgggtgtgaggaccttacccagggaggttgtaagtgtcaagttctccagcatcacatcgtggtacaggcatttctgagcctcatcaagaagaccccactccttccaggagaagtaaacagccacgtcctcaaaggtcacaatgccctgccaggatggggacacatgaaaccacaaacggttcctcctctcaggatccataatccttcccctcacacatttaccccatgctcatcctctttccaagctctccaagctccccagctcagaggagaaagcagtcagctggtgctgttgtctcctaatggggctcttggtcactggttgcagccatcagtaacaagaggcaggtgaacaaatacatgtatctaagctgtgggcgtggcataagggcaaccactccttcctgacaagcattcctctcatatgaccaaggtcatgtaagtctcaatcaggacactggggccatcaggcacactccctctccaagtgcatatcattcattacactgcacatacctcaggtctccagatcccactgccacatgaccatgaccaccactacgtcctataccacaggcaaatcctggcttccccacatgctacctgagtgaaagagtagataacctgggccgggtgcagtggctcatgcctgtaatcccagcactttgggaggccgaggtgggcggatcacgaggtcaagagatggagaccatcctggctaacagggtgaaaccccatctctactaaaaatacaaaagatcagccaggcgtggtggcacacggctgtagtaccagctactcaggaggctgaggcaggagaatcactagaacccaggaggtggagaggtggaggttgcaatgagccgagatcacgccactgcactccagcgtggtgacacagcgagactgcgtctcaaagaacaaaaaaaaagagtggataaccaacagccaaatataagacacgtgacattggacaaatgagatcaacagtttattaattttttttttttttttgagacgaaatcttgctctgtcgcccaggctggagtgcagtggggcaagctccacctcctgggttcatgccattctcctaccttagcctcccaagtagctgggactacaggcacccgccatcacgcctggctaattttttatatttttagtagagaaggggtttcaccgtgttagccaggatggtcttgatctcctgaccttgtgagctgcccgcctcggcctcccaaagtgctgggattacaggcgtgagccaccacgcctggctgaacagcttattaattaaagacaaatactcatagcctgtgaaagaataccacactccacacagggccatacggaggtagtactccagaaaagagtaacaaccaggtgctgtagaatgtaagttttgtagcatcaagatggagaagctccactggtccccagaggaggggactggcttgtttgaataactcaaaaaattgatagggaactgaaacccactacaaagtaataagcaggaactgttctggttccctggataagaatggataagaagggttcatttggctaagagagcttattcatgggagcaaagtgggaaggggaatttgttctcaggccatctaaggctgtatcgttttcatcagatgtcaaggcgacatatcatactgggccttaatttccggccttataccgcaacttggcaggcagcatccagagtgtggatataaacaggatccaaaatcccagacttcccacagcttacactagtggaagcagcctcaaaaatttctttgaaggcctccctgccaggctgtattccttgcctcagacatagccacacagaaccacaggtgaatcacagataaccatggccctattccacttctgtgctgcacttaccatccccttgagagtcatatatccacctaaagctcatttaaatcccagcctcactggtcgttcatctcacacacaatgactctcacaaatgaccacatgacactaacttaatcttccagcctgaatgaaacacccaggccccatcaagttatcacaaaatcctggatacccataaagtggtgaataagcacgagttttggcctgagtgtcctatgcgtttgcatccatctcatgtccattcttctcttgggagccgtggccactgccaaactacactgtcttttacataccttgccttcatgaccacttactctatcatcatcctcccagtcttggcccactaacagctttacaaccaaaacctggagcttgccccgcctaactgtgacccacagctcactaaccttggtgcgcacaacagccacatcttgaatatctgcaccctgaaccactccctagatttcaagaccggcacgttcatctgcccacttaacgcctccatttagtaggctctgaaagatctgactcttagcatggcataaacaaacctgatatccctagtgaatattactcctattgccaatttgttcatcttagttgatgaaacttctttccctacagctgctaataccaaaaaccctggagtcttctctgaaccctctgtttcactccctcaccacctacattatgtaatttagttgtcccttttgaaaccacacatccggaatctaaccacatctcctaaatcacgatcctgggccagtaaccctcacttggactagtctaccctgattttccttcctcctccctcaaccccccagtttgtgccccactgtgcacacagatgaagcctgtgaagaccttggtaaattacctcttttttctgattcaaacttgctattacctcctgaaaacacactcaacttctcaggcagccactgcagtcctgacgcctatcctcctgttctttgcttcccaccagaaagcaaggagacttgtggcttcataaatgcacccagctccgtactgcacctaagcatttgcacatcttgtacctttctggaaaaactttccacacccgttcacatggctgccagaaattggaacaactctatataccggctaacatggacataggaccctgggcttggggttcacccaaggtcttcagaactaagggctgggggaatggcactccacaacccagagaacctgtgggtgggagttagggctagtgagagactgggaaaccctccccttcctggcgtagatttcataaccctttacagccaagggaaacgtagaaagagccaggcctcagagaagagcatctatggcggtattagatgggctcaagccaccccgtagccccatgcctggccttggagccgggtgccctcgcaatggctgtgtcacctctgtgccccagggctcagtggcgcctctcatcaggggctccttgccagtcgcgccctcccttccctagcacaccaggtgttggaaacgggagcccctccggcgagcccccgtgtcctgtcctgggcagcagggccgcgagcaagcgccctcgggggtgctaggactagcgtggggagggcggggaaggcccagaggacgcggcacatacctgggccggggccgtcagctcggccgccgccatctgactctgtgagcggagcggggccagagaggatgtccttattccgggccgggcctgggtaccctgggcgccgccgagcctcagccacgcctctgtgcagcggggaagactcctctcgcgccttctcagtcagtcacggatgatgctgacccagcgctccggggctttctaccaagtaatcagtccagacaaatgccaaaacgaccgccacaaggaggacaacggaagtcccgccgcgaccgcgcgtgcgcttacggaaacaccacctttcggaggcctcattggctgaaggtcgccgtcgcccaacgcaggccattctgggtaatgttcccacaggcgcacggcgggagagtgagggtcgcctccacctccttccggaagtaaaggccaaacccctgtagggggcgctgggaaatggacactccaggttggggcggaggcgaggcttcgttctttcttaaaggagacgtacccaggtttctaccgattgctgtctgccagtgtttgtttggagacgtgtcatttcatgtgttcccagaggcacatatccagatgcacatattattacatacagtcagtcagtcacaaaatatatccactggttgagaaagcaaataaatatgactatgttgcggccgggcgcggtggctcacgcctgtaattccagcactttgggaggtcgaggcgggcggatcacgaggtcaggagatcgagaccatcctggctaactcagcgaaaccccgtctctaaaatacaaaaaataccacaaaaaaaaaaaaaaaaagaaaaattagctgggtgtggtggcgggcgcctgtagtccccagctactccggaggctgaggcaggaaaatagcttgaacccgggaggcagagcttgcagtgagccgagatcgcgccactgcactccagcctgggggaaagagcgagccactgtctcaaaaaaaaaaaaaaaaaaaaaaaaaaaaaaagactatgttgcaattcaaacgcatgcactcaagcactggagtcagttttctcagtctctgtatgtttgattagggacaagaaaaaaaacactccacacaggttcatgacaaagaggatgaaggtgggatgcggaggcaccctgcagcagcaggacataagtagatccctgtctctgggtccctctcgtgcctgtgtagtcaaacattgtgtccaattcactaagcaacacttgcatgaatctaatctcactttctccatgcctttatattcacttctttttaataatttgacatcaagctcagaaagagaacaacaaaaggaatggtattttgaaaaggcatgatggctagctagagcattaacaggtggaacaaagggtgctctgaatcccaaatgtagggtgtatcttaaattcaagatctcttctcaacgctgaaatgattatctttgcccccattagttacgctcttgttgcccaggctggagtgcaatggtgcgatctcggctcaccacaacctctgtctcccgggttcaagcgattctcctgcctcagcttcccaagtagctggaattacaggcgcccgccaccgtacccggctaatcttttttttttttttttttttttgtatttgtatttttagtagagacggagtttcgccatattggccaggctggtctcgaactcctgacctcaggtgatccacccacctcggcctcccaaagtgctgggattacaggcgtgagccactgtgcccggccctttgcccccattattatagggctgttctgcataaaaaattgatacgatatcagaaaaagaattgtaaaatacaaattacagaaagctactaataatgggtgtcgcttcgccagccagaaacctctgtggtcgcgcctctgcttgagttttgctcacacccgctgggcttgttccacccactcggcccagcaggctgcacctggatcccacacctaccaagggcgagccaggcgcggagccgcaaggggtgtgtgagcgagcaagtgaagggtccagccagtgcacacagccaggcacgctggctgctgcggcggggcgggcagctccaggcgctggcacaggcgccggctccttgcaagtctgcgactggaccagacatactgcaggcggcttctgctgcaggcaccagcatctagacgagggaaaaatggtggcgccggaaagctcggagacaccaagaacagcagaaccccaaagagggtgttgcagcatgtcacagccctggctccggagtctcgaggcctgggctcccggaagagccacagctcttctctccttcccgttgcttgcagcctggcaagcggggaggtgtgttttgggtggggtgtgttttcagcttgtttgtgatatagctctttcagtcccgctgccctgctctggctcgctgctgcttcccatcgtggggggcggccacccagtgctggctgagggcaggagggctatagtgttacagctctggctcggggaatcccaaagtctgggcctccagaagagtcgccatttttcactcatgcagcccagaagcatggctactcagccaggaatgtgttacagcccctttctctcctgctgttcgttaggtcccaagttcttgtcccccaagttcttatcccacgtccaggaagaatgaggttatgcagacaactggagggtgagcaaggcagagaagggttttattggacaacccaacagccctcaggaaacctgaagggagtagctcacacctgcatacagatagtctccgatgtctgagtctggctgagtctacaggttttttatgggctcagaatggagaaagtgtgtgctcattggtccatgggtggtaggaagtgcatgctgattggcccatgggcagtcatgggcgggcctgggaaaaacaccataccattggccgaaaggcgtcaaggaatttctctctctgggtcacagactccacctggaactggcagcgtggcctccaggcttcaggccattcgtggcttgaaggtggggtttcacagaaaacccaccccttcccacgtaggaacctgtctgcctttcatggccatcaacatgctgtccatgacgcccaggctgtccatgctgaaggttgcccgcaggcctgccccgagccactctcagccgcccccctcccaccacccggcctccttcccatgcttcttggtgcccaaagtttcagcctcaaaagcagtttctggaggaaatcgagatggtggggggctggcatgtcgtcactgccccgagggcacacacatttggctgggttgtgatagcgcccaggtttggctatcttgacatgtccacaactttgctctgccgtggagcaggtgctgagagtggggagaggccagggagtgggagcaggcacttctgggcctgtgggaaaagggtgcttcccaggtccccaagagtgcagggatgccctgtctggagccacgactaggtggctgcagctgcgcctgggagcacagggctcccgtcctgacaactcggtatggctcgaggctcccactgggatcacctgttcccagtccccgtgggctccacggagcatgcagccctggccgtgcctccccatttgcagccggcatcatcacagcggcccctccagatcagccactgctgccattataatgactatgtagtcattcaaaaatggtggcagaatcgtgtttgggaaatatcggatggtgaaaaaagtgaaggtctcacagaactcttttgttttggtttttgtttgttttttgagacggagtttcgctcaaaacggagtttttgagtccaaggatgtgaacttggactgggaggtgtgcaggaggggtgctgagtactaggtctgcgtgtcttgttctggtggctgtctcaagccatggtccacctggagtgtgggctagctgcatctcagtaatggcctggtggttgactaactgccttgaagtaatctctggaattttgcagataggtccctatgcctaccaagtctgtctcaagattatccccaggaacttctaagtaagcacataattagatactagcatacaattagacaaatgtgcatggtctaagggagtgtatggtgagaagcggtggacatggtatttcaaagaaagtacatttcaaggctgtattttaagactaatgagaagaaaagattctgcagtaaggttcaaggttatatcacaagactagggaaaaatgagaaaaaggaaaaaaactttttcaggccaggctgttcagttacaaaactagttttagagttgcagtgtgtcctgtcagcagccattaaataaaacttgtttcaagttacagcagggagtttcagcagccaggcttctggagaattacatttttggatcagggttatatgccctgagtgctttttttcccacagctctttcaactctgttttaggtgggtatgacaagaatgacccaattcatatgatcaactttcacacaattaatagggatcccttctaaatttgctaaatctgcaggatttttgagtttcgactggggggaaaacccaccaaatctcaaatcaatacatgtttattttcctaatacaaaacaaaatgttgttttctattatttatgtactatcataaagtaggatgtgaaaaatctttgtcagagacatggaggaaatttcaatgtgtattaataagcaaagaagccattctgaaaaggctacatagtgtgattccagctctatgactttcttttcttttcattcttttttttttttttttttttttttgagacagggtctcactctgtcacccaggctggagtgcagtggtgcagtcaaagctcagtacaacctcaaccacctgagctcaagcgatccttccatctcagcctccagagtagctgggactacaggtgcacactatgcctggctaagttttgtattttttttgtagagatgggggtctatgttgcccaggctggtctcaaactcctgagttcaagtgatctgcccacctcagcctcccaaagtgctgggattacaggtgtgagccactgtgcctgaccaagcaggtgtattagttttctactcttgtgtaataagttaccgcaaagctattggtttaaaacaatacccacttattatctcacaattgcctaaagatagcttagccgagtatcttggtcttctgagagcctgactctcacaaggctataatcaaggtgttgaccaagcctgcaatttcttccaaggctcggagccttctttcaaactcacatagttgttggcaaaattcagtgtcttgttgcaagaataaggttcctgcttttttttttttttttttttgagatggagttttgctcttgttgcccaggctggagtgcaatggggcgatctctgctcactgcaacctccgcctcctgggttcaagacattctcctgcttcagcctcctgagtagctgggattacaggcatgcaccaccaagcctggctaatttttgtgtttttaatagagatggggttcctcagtgttggtcaggctggtctcaaactcctgacctcgtgatccgcccgcctcagccttccaaagtgctgggatcacaggcgtgagccactgtgcccggccgtcttgttttattttaatggctgatctatgtaatcacggaggccagtatgtacagacaagaaagggggagcttttattgcttctctcttcctccttggacaaagtcttgatatcacctccttcttggcctgagtgtactcttcagccacttgtgtgcttgcttgttctcagacctgtgggcctcagcctgggcagccaggagcttcttttgggccttttctgccttcagctcgtggacgtgctccatgaggatgtgctccatgagaatctgcttgttttgaacacatttgctttcaccttcaggtacaagctgggatacatttggtggtcaatcttcttaacttcatgggatcttctgagcagcccgtgcagaatcctcattctcctcatccaagttaccttctctggcattcaggcattggccataccctttagcttacctatgtccatgtactcacccttccagcaggccaaggcatttttccagcatcgagcccggaaatggacagtcacaggcttgtggatgttcagcctatctttgatcagcttctggatctgctgatgggaggtggcattggtgatttcactggtctccttggagtgcaattagaccttctccttgccacagcaaaggacatgagaggtgagcctcttctgaagcctgcgcatactcatggcttcggctgcagcagcagctaaaggaaagagctctgaggttcccagtttcttgtcggctgttgctgggggccatctcaactgctaggggcccgtggcgtggccctctcacagcaggaggatctcgctcccgtgtgctgaggcagtcttatagaacagtgaagggggggagtatcttattgccttggcctaatcacaagagtgacgtctgtcagattcacagcccccactcaatggaaggaaattaggcaactgagtgcactgaggggtgagaatcttggggccatcttataattctgcctcccattgcagtttttgctaatagacatctgcccacgaagatccatgttcttcccttccttgttcacttgatatttgctacaaagcagcccagtctgtccacgctggaggctaggtatggcatggcatgttcccagcagaactagaactggagcatgaaccatgctggctaccactgcctggaggaccatgcacagtctatagtccctggtggattccagagccaccaaggcatgcaggaggctcctccctgtcttccctctctctgggctgctcatctggaactcctgagctcaggtgatccgcccacctctgcctcccaaagtgctgggattacaggcatgagccaccatgcccagcctgggcacctcatctgatttaggaccctggaatagaattgctctgagaattatcaatgaaggaatagattttacccctgcatctgctggttccattgcccctcatccggctcccaggaaagctttgaattgtgggcaaaaccaggtggcactggcagagacattcttggggttggtgtctcccctaaaacacactgtgccttctagagaggttccctagaagtcgcgatctttgctgagaaatatccacacatgctttgccacattgtcaatcataggaacatgctgcccaacaaatatttgtggcatagtaaaatgtttttaaaagcagttgctatggattgaacgtatccccccccaactccccgccatcaattcatgtgtcctgatgtgatggtatttagaaacaggccttctggaggtgattaggtcatgaggatagagccctcatgcatgggattagtgcccttacaagacgagacagaaaagagcttcctctctctctcaggaataatggtgctcaggagaacccagccatactggcaccctgatcctagacttacaactcccagaactgtcggaaatacatgtttgttgtttaggccacacaatctgtggcagacaagctaactaaaactgcagtcttgcaggctagtgtctccctagttaggatttgatctcagagcctcaagggctgggcatggctcttgcctcaaggattgaagttgcagggagggacatggaggcctgtccaggacctgggagttgtgccttggtacagtgccctggccgctctgtcctgtgcccccggggctgcccatcccatgtgtgattcctactggctgcactgtgcaggcaggaccaagctgtcggcttgagaaatgctttgcactgtcccaatttctaatatacacactgacttttgccttctcacattgtctgttctaatttttaaaatttaatttaggaaagatggaaactgaaaggaagggttagaagacctgagtctgagttcagttcatcctcaacatagactaatttttttgtggttttttttttgtttttttttttgagacggagtctcactctgtcaccaggctggagtgcagtggctcgatctcggctcactgtaatctctgcctcccgggttcaagcgattctcctgcctcagcctcctgagtagctgggactacaggtgcccaccaccacgcccagctaattttttgtatttttagtagcgacagggtttcaccatgttggccaggatggtctcgatttcctgacctcgtgatccaccctcttcagcctcccaaagtgctgggattacaagcgtgagttaccatgcccggcccaggctaatgttttttttttaacagcttgactgagatttatttcatttagtgcaaagttcactcttttaaagtatgcagttcaggccaggagtggtggctcacatctgtaatcccagcactttgggaggctgaggtgggcagatcacttgaggtcaggagttcaagaccagactggccaatgtggtgaaaccctgtctccactaaaaatataaaaattagctgggcctggtggtggatgcctgtaatcccagctacttgggaggctgaggcaggagaattgcttgaacctggaaggcagagggccaggcatcgtggctcacgcctgtaatcccagcactttgggaggctgaggtgggaggatcatgaggtcaggagatcgagaccatcctggcgaacacgatgaaaccccatctctactaaaaatacaaaagaattagccaggcatggtggcaggcgccagtagtcccagctactcaggaggctgaggcaggagaatggtgtgaacccgggaggcggagcttgcagtgagctgagatcgcgccactgcactccagcctgggcaacagagcgagactccgtctcaaaaaaaaccaaaaaaacagaacctggaaggcagaggttgcagtgagtcgagatcgtgccactgcactccagcctgggtgacagagtgagggagactctgtctcaaaaaaataaaaaataataaaatatgcaatttagtgctttttgtatattcacaaagtttacaaccatcaccactatcaaattttctaacattttcttttttcttttcttcttttttttttttttttttttaagaccgagtctggctctgttgcccaggctggagggcagtggcacaatcttggctcactgcaacctccacctcctgggctcaagtcatcctctctcacctcagcctcccaagtagctgagactacaggctcatgccactatgccccactaatttttgtactttttgtgagacggggttttgccatgttgcccaggctgttctcaaactcctgagctcaagtgattcacctgcctcagcctcctaaagtgctgggattacaggcatgagccactgtgcccagcctctaacattttcattccccataaagaaacctcgtacccacaagcagtcttccccctcctgctgccccagctcctggaaccaccaatctactttctgcatctatacagtttcctattctggccatttttaaagaacagaatcacacaatatgtgtctggcttcttgctcttagcataatgtttttcagtttgtttatattgtagtgtgcgtaagaacttcactcttttttctttttcttttctttttcttttttttttttttttgagacagcctcggtctgtagcccaggctggagtgcagtggtgcgatctcgactcactgcaaactccgcctcccgggttcacgccattctcctgcctcagtctcatgagtagctgggatcacaggcatccgccaccacgcccagctaaatttttgtatttttagtagagacggggtttcaccatgttggccaggatggcctcgatcccctgacctcatgatctgcccccttggcctcccagagtgacttcattcttttttgttgctgaaaaatatttaattgtacagatagaccacattttgtttatccatttgttggttaatggacatttgggttgtttccaccttctggctcttatgaatggtgctgctaagaacattagtgtgcaggtttttgtgtgtacatgtgttttcagttctcttgcatgtacacctaggagtggacttgctgggtcatacagtaactctatgtttaactttctgaggaaccgtcagattgttttccaaaacagccgcaccgtttcactcactcttgcctctttgcattcccacagcccttggtgtccacttgctacctctggccgtgtttcttagctccttgcctgtgggcctgtttccctcaagagagctggaacctgacggcgatgagtgtgtatttcttttttgtgtggagacggggactcactatgttgtccaggctgctcttgaactcctggactcaagcaatctgcctgcctcatgctcccaaagtgttggaattacaggcatgagccatcatgactggcctggatgagtgtgttttacttattttatttaattattttatttatttattttatttaattaattaatttttgagacaggatcttgctctgtcaaccaggctggagtgcggtggcgcgatctcggctcactgcaaactccgcctcccggattcaagcgattctcctgcctcagcctcctgagtagctgggattacaggcgcatgccaccatgcctgactaatgatgagtgtgttttaatccggagtcatatttattttaacatcctcagtttcctcatgtgtacaaaggaaacaaggtatggagctgacaggtaatctcaccaggaaagttttgcttcatgaaagctattccctggctagtctgggagatggccccccaaaactacttgtgcggtatttctggtcaggagcaagagaagaaaatcctgacaagttctcttaacccttaacaaagttggattctattctattttccaattaagttataattattcatcaactatgagagccaataagcaagagttgctatatcatgtggctttattttctgggatacaggtctggcatttctttctttgatgtcctcttccataaggttctctgggagcaagccacgcccacaggctcagtctcccagcacccccatagtttctcctctgcctcagccggcacctctgtcgtctgcgttcacaagtcttccatttttccattatgtgacgcattctttgttttgttttctgttactgagttttgctcttccttcagtttcttcttaatatttttgcttctttttgatataataactaaaatgtagaaatgatgttattgagatagtaataagtgaggaataaaaatggagacaaaaggggtgagggaaaaagcctggaaaaatagaggtaccaacagtggaattttcagaggattcataatgaatgttatttgtctgacaaggatggtgaaaattaaattttaaaattattttcccatattttgtattcaagttgtataaatgcccagtaaaagaagaagaagaatgtagaaaatttataatccaatgtggtaaagagacattgggaaaatgttttctacaggttatgacaaagtcctctgcctcagtgagcatcagtgatctctcctgctgtggctgttctgcctctttctggctatgtctggagtttttagagagtgagtccatgtgaggatggttagtatgtctgaatcacacactacactctctatagttttctctctagaattttttaaacaggtacccacgaatctcagaacttctaggctgggctcagtggctcacacctataatcccagcactttgggaggccaagacgggaagatctcttaagcccaggagtttgtgaccaacctgggcaacatggtgaaaactgtctctactaaaaatacaaaaactagcccggcgcagtggctcatgcctgtaatcccaggactttgggaggctgaacagggcggatcacttgaagtcaagagttcgagaccagcctggccaacatggtgagaccccccatctctactaaaaatacaaaaataagacaggcgtggtggcatgtgcctgtaatcccagctactcgggaggctgaagcatgagaatcacttgaacccaggaggcggaggttacagtgaaccaagatcacaccactgcactccagcctgggcaacagagcgagactccatctcaaaaagaaaccacaaacaaaaatgagcccggcatagtgacatgcaccgtagtcccagcaactcaggaggctgaggtgggaggattaactgagcccaggaggttggggcttcagtgagctgatattgcaccactgcactccagcctgggtgacgtagtgaaactctgcctcaaaaaaaaaaaaaaaaagaaaaaagaaaaaaaaggccaggagcggtggctcacacctgtactcctagcactttgggaggccgaggcgggtggatcaattgaggtcaggagttcgagaccagcctggctaactggtgaaactccgtctctactaaaaatacaaaaattagccaggggtcatggtgcacgcctgtaatcccagctactcgggaggctgaggcaggagaattgcttgaacccaggaggcaaaggttgcagtgagccaagatttcgccactgcactacagcctgggtgacatagggagactctgtctcaaaaaaaaaagataaataaataaaataaattctacaggcggggtgcattggcttatgcctgtaatcccagcactttgggaggctgaggtgggtggattacaaggtcaggagatcgagaccatcctggctaacacggtgaaaccccgtctctactaaaaatacaaaaagttagctgggtgtggtggcgggtgcctatagtcccagctactcgggaggctgaggcaggagaatggcgtgaacccgggaggcagagcttgcagcgagctgagatcatgccactgcactccagcctgggcaacagagcaagactccgcctcaaaaaaaaaaaaaaaaaaaagaacttctacaaaatcagttttaaataatcaatttcatcctcttctcacaaggacagcagaacatgtctgtggtgggcatggcatgctgggaaattttaccctggggtagtgacctctattttgtgggtctggatcccattttcacgtcagatggagacagatggtgcaggtgaaacatctgcgtgtctgtgttctgaatgcaggataacatcacggtaatgagtatgtttaacggaaacatgttttgtgctgggaaaagtttgtttcctgaactctgttagatccgtggaattgccctgcaaaaggaactgagcaaccccacagctgttcacccctctgtaagatttgatgagaaaggttcatttccgtaagtgtggctgtgaatatttgtctctcttacttcaaactcccttaactcccacttatctttgcctttgaaaaccaagccacaggccaggcgcggtggctcacgcctgtaatcccagcactttgggaggccgaggcgggcggatcacgaggtcaggagatcgagaccatcctggcacccgagcgttggtggtatagtggtgagcatagctgccttccgagaccatcctggctaaaatggtgaaaccccgtctctactaaaaatacaaaaaattagccgggcatggtggcgggcgcctgtactcccagctactcgggaggctgaggcaggagaatggcgtgaatctgggaggcggagcttgcagtgagcagagatcgcgccactgcactccagcctgggctacagagtaagagtccgtcttaaaaaaaaaatgaaagaaagaaaggaaggaagaaagaaagaaaggaaagaaagaaagaaaagaaatgcaagccaccgctgagaaagaaagaaaagaaacgcaagctgccgctgccagcttggctttcctgcgaatagctcttacaggtcacactacctgagtggatgaacttttccagctcattttcgttctctggaagtaggtgcgtggactcaccctcgtcctctgagccctcttcttcatctcctaataacggtatcctgaggttcttataaagtgactcgagctgttgtctttcctcagcctgtgccagtcgactggagaatgatataaatgaatttagaagcacagttttcatgatgaataattcatttctcaaccatgccactttttgacaggaaaggagtcgcttgtggagtgggtgcagacataagactttgaaaccagactaatcatggtcagctctcaactgtctacatggtcaggccatttcctggagtaaggagtaactccgatcatcccaaagcatggatcaaagccaggactagacgtgaacaaggcactcacattgggttccaaacttaaggtgttgacaaaaaatccataatcaaacaaatcatctttctttccattcctttctcttctctttttctttctcttttttttcctttttctttcttctttcctctctttccttcctccctcccttcttttctttcctttttctttccctttctctctctctctccctttctctttccctttctctctctgtatctctccctttctctttctctctctctttctctctttggaacagggtctcattctgtcacccaggctagaagtgaactgatacaatcatggttcactgcagctgccaactcctgggttcaaacagtcttacctgctcagcctcctaagtagctgggaccacaggctcgtggcaccatgcccggctaattatttttgtatttttttttttagaaattgcgtcttgctatgttgcccaggatggtctcaaactcctaggctcaagctgtctttcctccttggcctcccaaaacactggaattacaggtgtgagccactgtgcccggccataatcatgtttcagtgtaatattttacaaaataaaaattaatgtcaagaaatccgtgatgaacaaaataggacagaatgggtgttactgatttttctacctcactgtaggtccaatcctggaagtggatcactgaacagctatttctgtttggtgtggaaatggatgacagtgttttcctaacatacttaccttcccagtactgtgtgaattatatattaaaaaaatacttttaggggccaggcgcggtggctcacgccagtaatcccagcactttggtaggccgaggcgggcagattacctgaggtcaggagttggaggccagcctgaccaacatggagaaaccccgtctgtactaaaaaaatacaaaattagcagggcgtggtggcacatgcttgtaatcccagctacttgggaggctgaggcaggagaatcacttgaacctgggaggcggaggttgcaatgagctgagatggtgccattgcactccagcctggccaacaagagtgaaactccatctcaaaaaaaaaaacaaaaaacttttagggttagtttattttttgtttttcttgctcaaaaggctgggacaggagcaagatttgagtgacaaaagggaggtgctcgcctcagtgcgaaatgtaaggaggtaccccaaacagtgaaaaatgaagatgagtattttaactcaatttttttttttttttttgcagatggagtttcactctttttgcccaggctggagtgcaatggcgcgatcttggctcaccacaacctccacctcccaggttcaagtgattctcctgtctcagcctcccgagtagctgggattacaggcatgtgccaccatgcctggctaatttttttgtatttttagtacagatggggtttctccatgttggtcaggctggtctcgaactcccaacctcaggtgacccgcccacctcggcctcccaaagtgctgggattacaggcgtgagccaccgcgcccggtccttaactcagtatttttaaaaattgaaatgaagcaaaaaaaacaaaatccaggatataccaaatatcaagattgtaaacagagataggatccaaacagtgctgtgctaaaccacaggggagcttgagtcaaaaggaaaggtgtgagtccctatacacgttttaatgtatttttaaatgcttattcttttccaaaacacttaagaagttcagaatatatttaataattgaaaactggtgtatgaaaagtcacaacattaagtttaaatattttatctaggccaagcacagtggctcacgcctgtaatcccagcactttgggagtccgaggcgggcggatcacgaggtcaggagattgagaccatcctgggtaacatggtgaaaccccgtctctaataaaaatacaaaaaaaaattagccgggcgtggtggcgggtgcctgtagtcccagctacttgggaggctgaggcaggagaatggcgtgaacctgggaggcggggcttgcagtgagctgagatgacgccactgcactccagcctgggcaacagagcaagactccgtctctaaaaaaataaaaataaaaataaatattttatctctaccctaaacaaaattaattgtaattttactttcctggtttaaataaaagcaaacttaccaatagtattttcaaaatctacttctggaaaaaatgaaccactaaaaattacataaaacttgtacttttgaacaggtggttttgttttttttgtttgttttcgttttggttttggttttggccccaggctccactatagcttagtgctaatacaaatgtgaaaacaataagaattgactagctcagcaactcaattcaacactgagtgtccaggagatatgttttactgagttgcattacaaaactttatatttattaatagttttgttataataatgaaatatacagaagctacagttacataatttttgtttttgagacatggtctcactctgtcgcccaggaggaagtgcagtggtgcaatctcagctcactacaacttccacctccagggctcaagccatcctcccacctcagcctcttgagtagctgggactacaggtgcgtgctaccacacctggctaatttttgtattttttgtatagacgcggtttcaccatgttgcccacgctggtctcaaacacctgagcttaagggatccacccgcctcggcctcccaaagtgttgggatcacaagtgtgagccaatgcccccggcctatacatttacataaattaagcggatgtagtggagataacccacaaccaagcacgcaggttacgctctcattagcaaaattccccttttacctttaatgtcactttgccttcatgtgacctactccaaggtggtcttaacatagctgcctcagaaaatatctcacacatggcaatatatcttgttttcacacttaattcaacgaagcaagcaattttgtacttctcaagctgtttctggtgggatacaatggaatcctagcacggaatcatacagtaggagtcagaatctgttggtttggtcagaaccgcatgagatcacagtgtgtctcacctttttctaccgtgaatttcaaaatgattacatcactcaaaacagcttgaccccaagctttatttgcgaagacggtgatgtaacttcccccaaagctgctatcaccccagactgcactgacacatttctagtgaaagggagagtggtcgctcttttctgctgtgcactattgagattccttccagagtagcaagttctttttattttatttatttatttatttatttatttattatttgcgacagagttttgctcttgtcgcccaggctgaattgcaatggcgtgatctctgcccactgcaacctctgcctcccaggttcaagcaattttcctgccccagcctcccaagtagctgggattacaggtgcccaccactacgcccagctaatttttgtatttttagcagagacggggtttcactatattggccaggctagtcttgaactcctgacctcaggtgatgtacccgcctcagcctcccagagtgctgggattacaggcatgagccaccacacccggcctcaagtttattttaaaataccaaattctggggtctgggaatggtggctcacacctttaatcccagcactgggaggccaaggtaggcggatcacctgaggtctggagttcgagaccagcctgaccaacatggagaaaccccatcactactaaaaatacaaaattagcctggcatggtggcgtatgcctgcagtaatcccagctacttgggaggctgaggcaggagaattgcttgaacccaggaggcagaggttgcagtgaaccaagatccataccattacactctagcctgggcaacaagagcgaaactccgtcccctcccctccaaaaaaagtagaaaaaataaaataaaataaaatactgaattttgggaggatgctagcatctcaaactgtgtctttcaagcatttttgatcatgactcccagtaagaaatatattttatttcacaaccgtgtgtctgtgtgtgtgtgcatgtctcacatgtatctgaaaagtttaaaaatcagccttttacattaatactttaagtaatattttcttttctttttctttttttttttttcagacgagtctcactctgtcactcaggctggagtgcagtggcacgatctcggctcactgcaagctccgcctcccgggttcacaccattctcctgcctcagcctcccgaggagccgggactacaggcacccgccaccacgcccggctaattttttgtatttttagtagatacggggtttcaccgtgttagccaggatggtctcgatctcctgacctcatgatccacccgcctcggccttccaaagtgctgggattacaagcgtgagccaccatgcccggcgtaatattttctaatattttctattctgctgaattgtattctgtcctgtgtctttctttctttttttttcatgtgtatcatgcctcaacatgagtacaatccacatgttgaaaaacactaatctggaaatttataatgaccaatactttagcaattataagatgtatcatcatcatcctttgacattaaataataatcagttgacttgttatgtctcatttaaggacagcagatattacttagcagatacttactatatcatataggagattgccatcccacatatcagggcaatgctgaaggctacgctcgaaattaaaattactttaacaagagcaggtctatgccgaattattgctaaaaagaaagaaaagaaaagaagtgctcaaaaatgttcattttagctatgtctttcagttaatatatttgtccttacagaggggaatggaagtcaaaaccagaaacactttcaaaaatagcttgttttgtttttttttgttttgttttcttttttgacactgagtctcgctctatcacccaggctggagtgcagtgcatgatcacagctcaccgcaactttcgcctcccgggtccgagcaattctcctgcctcagcctcccaagtagctggcactacaggcatgcgccaccacacctgcctaatttttttgtgtttttgtagagatgggattttgccacgttgctcaggctaggactcttaattttagaaaatactgaagttagattttcagtgagccgagatcatgccactgcactccagcctgggcaacagtgtgaaactccgtctcaaaaaaaaaaaaaagaaagaaaactgaaacagaccattggggattgggcatccaagaggtcactagagacctgggcagaggccatattagctgtgtggtggggacacaactgaagcagtttcaggagggagtgagaagaaagtaactgtagaccatgaattttgaaaattattttggggaactttgtataaaagaaagaagagaaatgggcacagctcctggaggagtctaagggatcgagagatggattttgttttttaacatgtgaacactggcagcatgttcgtgaatgggaatgaaagagtgaatcgtgatactacggtgccagttcattctggctgctgtaacaaaacaccacaggtttggtggcttagaaacaacagacacagccaggtgtggtggcccactcttgtaatcccagcactttgggaggccgaggtgggcagatcacgtgagctcaggagttcaagaccagcctgggcaacattgtgaaaccccaactctacaaaaatacaaaaattcatcgggtgcggtggcaggtgcctgtaatcccagctactcaggaggctgaggcaggagaattgcttgagccagggagtgggaggttgtagggaggtgagattgcgccattacactccagcctgggtgacgggaatgaaaccctgtcttaaaaaaaaaaaactttgggaggcaaggcaggtggatcaggatgtcaggagttcaagaccagcctgaccaacacggcgaaaccccatctctaataaaaatacaaaataaaattagctgggcatggtggcacacgcctgtaatcccagctactcaggaggctgaggcaggagaatcacttgaacccaggaggtggaggttgcagtgagccgagatcgtgccactgcactccagcctgggcaacagagcgagaccctgtctcaaaaaaagaaaaagaaaaagaaacaaagaaacaacagacattggtttctcacagttctggaggctgggaagtcccagatcaaggcatcagcagctttggtggctggcgagggttcactttctggttcaacagagggtgccttctttgttgtgtcctcacagggtggaaggagtgagacagctctctgtgacttctactgtaagggtgctattcccagtcatgggggttccaccctcaagaccgcatcacctcctaaaggccccaactcctaatatcctcacctttggggttaggatttcaatacttgaatatggggttgggggacaccagcattcagaccagagcatgcaggaaagggagagggaattgtcaggaaagtccttgagttggcctaagaggatggaagctgggacacaggccagccttggcatggacggttcaatttccagcaagagacagagaaaggaggtgtgattgctggtagacaggagggtgtggatactgtcttttaactgcttgtattttgtttgtgaaggaggcaaacaaggtcattctgggagagcaaggctggggtagaatacattgagatatttacagagctagagaaatatatgagaaagtcaccaagcaggatgggagaaatagactaggaaaatgaatagcatatttttaataaaatttactagaaatggaattgctgggtgtatttattatattttcttattttccgtattcctgatgctctggcatttggggccttaatcctggagacctcccttcccagggctagctatttcctagagacagcgaataactcccctacaagcacatctttgaaatacaaaccaaccaatccacagcccacaccccaaccatctccttttcaaactcacacaataagccaatctctccctgcctgccctaaatcaccccagggccaaatactggacaactagaaaccatccctatgatttaccaaaactattcaaatctatatttgctcagagtacctgccatgcctcacccattccttccctcagaaaccccagtagaggcggggaccttgctcaccctcactccctgtgcttcctgaggttactggtgtacccgtgtgtggtgggccatgtctcctgtttccaggaatctataagtataaactttttccttcatgaagatcatttgcatgtctgggagtcttgccataactgattaaaataaatcccccaggtatatttcaacactctaggttaaaaagtaattgccagccggttgcggtggctcatgcctgtagtcccagcactttgggaggccgaggtgtgcggatcacaaggtcaggagttcaagaccagcctggccaacatggtgaaaccccatctccactaaaaatgcaaaaattagccgggtgtggtggtgcacacctgcaatcccagctgcttgggaggctgaggcaggagaatcacttgagcccaggaggtggaggttgcagtgagccgcgatggcgccattgcactccagcctgggtgacagagtgagactctgtcttaaaaaaaaacagaaaaaaaaaaaaaaaaaaaaaaaaaaaaaaccaagaaaaaaaacaaagtaagcaccttggccaggcatggtggctcatgtctgtaatcccagcactttgggaggccgagccgggtggatcacctgaggtcaggagtttgagaccagcctgaccaacatggtgaaaccccatctctgctaaaaacacaaaattagcggggcatggtaatgggtgcctgtaatcccagctactcaggaggctgaggcaggagagctgagatcgcatcattacactccaggctgggcgacaagatacaagattgaaactccatctcaaaaaaaaaaaaaaaaagtaatagcattgtttttatgagaactgtcaattgccctctctagaagttgtgctcactgctagcctacaaacaagacatgagattatgtttcccagctcctttgccaatacagttatgagacattttgcccactttcaacaggatagctgaaaactggaattacagtgtagttttatgaaattaaattattcaaacttaaactaatttaaacttaaagctgttggaactttgaactactctgaacctgagagcaatgtggctatgcagcctgaatcacaaggatgcagtggcaacttctgccttttttcctgtaaataagaagatcaagaggtgccagctgtgagagccccctcagatggcttcccctcctcacagagcaataatcttccttggaacgttgccgtctataaccaatcaaatagctgtaacttatgcactcgtctcatatggaaaatgttacaatcctgctacaatgtcagtctctgcacatataagtgaaaccataacttctcctctttggaaatgctgtccccattagtttggagtcagtgtctcgtgggtggacatcctcaagctttgtgctcaaataaactctgtacttaatcatatttgtcgaacttcattatttaagcttggcagtttcaatgcacaattcttactatgagtaaggtagacatctttccatataatttttttttttttgttacagagtctcgctctgttgccaggctggagtgcagtggtgcgatctctgctcacttcaacctcagcctcccgggttctcctacctcagcctcccgagtagctggcctccaccatgcccagctaatttttgtatttttagtagagatggggtttcaccatgttgtccaggctggtctcaaactcctgacctcaggtgatctacccacctcagccccccaaagtgttgggattacaggcatgagcctgtactgcacccggaccatcaactttattagataaacaattttgtcccgtctctatcctacctacaactgggacctgaagctcaggggtggcagaggtctcagtgaccttctagcaccagcacacaaaacgagctagtgtcaaaagaaggaccagtgtgcaggcctttgataccccagccaggactcaagctctgtgctttggtgatggtggtgtcaatgggcaggtgaaacagtcatagctgagctttaggaagattgataatgtgtttggcgtggatggatgtattcatcacgttttttattttctgtatttcctgatactttgacatcttggggccttaactgacccttgaagagactgccctcccaggtccagccaattcctgaagatagtaaaccctggcctgcaagtgcacctttcatgtgcaagccgacacacccaaagcctacaccccaacaatctctatggagccctcatgctccaggccaccatcccctgcccccaaccaccccagggccaggtcccagacaaccagggacataccccatgccccacagccaccaaatcactcaagctgatcccaagcccgccttccctacctgccttcctgtaaaaaccagaataaagttgttttttttaaaaaagacagcctcgctctgttgcccaggctagagtgcagcgacccaatctcagctcactgcaacctccacctcccaggttcatgcgattctcccgcctcagcctcccaaatagctgggattacaggtgcccaccaccactcctggctaatttttgtatttttagtagagatggggtttcaccatgttagccaagctggtctcgaactcgtgacctcaagtgattcatccacctcggccttcctaagtgctgggattacagggatgagccaccgcacccggcccagaataaaggcttttgctcacactttcctggctccctttgccttctgatagaccctggtgcttccttgtgtggactcctgcttctagggacccgtgagtatcaggcttcttccttcatgacagtcatttctgtgtctgcatgtctcactcagcatatgtgattaaataaaatgctggctacatgtgaaagcagtggagatgggtaggtggtgggggagctgactcagaagccgccctgttgcaggcacttagcaaatgtgcagaggagaaggaaggatgctctggggcgggagcagcagcaggacacaaggtgccttctgctttggaggactctgaagcgagaggtgttgaggaggttccaggacaagccacagtggggagagttgctagaaaggctgctgacagggccgctgtgtgtgcccatgcattttgtgtgttccacaaagagatctcagacacagcctgtgctctactcactacaacatcagcccgtggagttgagccaccttctcacctgccccaagcggtgtcactgcgcatccccctccagagggggcaccttgtctaacacacatgaaggcaccacgtgtgcaggctccttggtgaccagccagcaccctctggagccacacatcacgacagcttcaggaatgttgcgggtccacccgccctcccagatcccttggcttacctttattcctcaggaatttcatggggttcgtaggggatgcagctaaaaggccatcaaaggggatcaaaaagaagagactttaagatggtttaagatgaacttgggaaaacaaggaaataacttagcattagagaaggacgccgaacacacagcttccaaatatctaagatgggatgtgttaatacattcctcccaatgcctggcagcaatgtgtgggttaatttgcagaagcctggtgagcctgctgttctttttgcacctggtgcttcctgtcatgaagaatgacctttaggaacaggatacttttggtttctggtctccttttgcagtcatacaagttgggaaatctctgcccaaattaaggacctggagagacttagagttgaaggggctacgacctcattagaaggtcagcaagggttgggcacagtggctcatgcctgtaatcccagcgaggaaggcagatcacgaggtcaggagttcgagaccagcctgaccaacatggtgaaaccccgtctctactgaaaatacaaaaattagctgggcatggtggcacgcgcctgtagtcccagctactcaggaggctgaggcaggagaattgcttgaacccggcggtggaggttgtggtgagccgagattgcgccactgcactccagctgggtgacagagtgagactccgtctcaaaaaaaaaaaaaaaaaaaaaaaaaaaaaaaaaaaaaaaaggatcagagagccaggcagagaggccagggaaccaacaatagtgtcctttcctcggacacaaattacatgcaaatgtatcacacagacagcatttcccttgcatggaatggagattatttacaagcatcatatatctccacaaagggttgctgagcttcaaagattgtcggggttggttttgctgttataagataaacaaacatcctctagtactcaaattagaagggaaccatagaaaatgcttataaagaattctcggctgggcatggtggctcatgcctgtaatcccagcactttgagaggccgaggcgggcggatcatgaggtcaggagatcaagaccatcctggctaacacagtgaaaccctgtctctactaaaaatacaaaaaattagcttggcgtggtggcgggtgcctgtagtcccagctacttgggaggctgaggcaggagaatggtgtgaacccaggaggtggagcttgcagtgagccgagatcgcgccactgcactccagcctgggcgacagagcaagactctgtctcaaaaaaaaaaaaaagaaaaaaaagaattctgtacactcacaaaccttctgtgtctagacttgcatgctctactgccaaatgtgcaccaaattcaagtcagacaggcatacctgtgtaatctggatgggatcaaggtttttgtgtgcgcttattaaagtgaaatgaaaaagagaagaaagtggcaatccctaaagagaaagcagttaacagagagtgaagagcataagatctaatttccaagcaaatgtttatctaattatactctattttatggacctttctaccagcaagcacacagtacacattcacatggcagataagaggactccaggctacgattctcactccactgaatgaggaattcaatgactcacccgtggatctcgaggcagccccttgaatcccaggcaactgggttttatgaaagaacactttgggctctttggtgatgtttctgggtggttgtgaccgtttactgccttgaaaagaaaactttttgcggtgaaatgtaattaccttctttttatctcccctgaaacagcttttcaattctccctgagtcacataaaaccagtggttgaagctacctggtaagcctgttatgtttccagtgggatggagtccatctgcatacggcaagcataaatgaagttggcattccattaaaaacaaaaacaaaatgaggaaaccactctgaaccttgtccatcactctcaaattatcagtattttatcccgtagatgaaaggaaatacttagctacagtccagcatctgtcctctatttatctgaggaatcaagaagttctactcccttcagaatgtttgggcagtgacttggagccaccagtgtgaggtcagtccttgctgtgataatggagttccttcatggaaccatgctgaccaatggggagactacagtgtaagagggcagtgcttggaggtgcaggcatgatgagaccaggtccctgcctgcagtgtgcagattagtgaggaggcagaaagaaatcaattacagtcagccctccgcatgcatagttccccatccgtgatttccaacaacctcacttggaaaatgttcaggaaaaaaggaatgggcacggtggctcacgcctatgatcccaacactttaggaggtcaaggtgggcagatcgcttgaggccaggagttcaagaccagcctggccaacacagtgaaagcccatctctactaaaaatacaaaaatttgctgggcgtggtggtgcacacctgtagttcaagctacttgggaggctgaggcatgagaatcacttgaacccaggaggtggaggttgcagtgagctgagatcatgccactgcactccagcctgggcgacagagcaagactctgtctcaaaaaaataaaacaacaaacacaaaaacaaaaactagccaggcatggtggcgtgtacctgtagtcccagatactcgggaggctgaggcaggaagatcacttgagcccagaaggcagaggtagcagtgagccaaaatcgtaccactgcacaaagaaagaaagaaaagaaagtggaaggaaagcagtcacccttagaagggaggcaatgtgcacaggggagacccacagcaggaaggtaaagggggactcctgatgactgaaagtgggccctaggcttcagagatgggaggaatagaagacgggctcaaaaaaggcaatgaactatgtcatgtatgagggagacagaggggacctgggagtgctggatgttagggaccactgaaatcaatactgtccaggctgtgcatgataggtgagaggaagggaatacttccaggaagaagcagaagtctgggactttcttttgactcgtgatgtgacctgaccaacaggaggcccttttttttttttttttttttttttgagatggagtcttgccctgtcacccacactggagtgcagtggcacaatcttggctcactgcaacctccacctcctgggttcaaacgattctcctgcctcagcctctggaaccgctgggattacaggcatctgccaccacacccagctaatttttgtatttttagtagagatgggctttcaccatgttggcggccaggccagtctcgaactcctgatctcatgattcacccaccttggcctcccaaagtgctggggtgacaggagtgagccactgtgccctgccaggaggccctttaagacattaaaaaaactcttatctgtttaaacagagatgggatcttgctacgttgcaaggctggccttgaactcctcagctcaagcaatcctcctgtccctcccaaaatgctggcatgagcctcggtgcccggcctagaaattttttcaagataataatcttagtaataaggttataagttaccaggatgcttgtggtatattgcatatgacttatgaaatcctttggaatctctaaatcagataatttggattcactctggctattagaatacaatatccacatcctactggtagtatgattctggatatattatgctgctttctccaagatgagataatactgctaacttcattctctccaagggcctttgcacaaatcatgtaaaaaaaaaatccatcaataactaacttgcccctgccacatttatcaggtgaccactaatgtgtcaggccttgaaaggactacaatcaaatgttacacacctaagtgagcccaagctagaagagtcagaaggtgaaaataacagcctcccaatgacatcactaggccatcatttctcaaccactgggaagccatgggccctttaaaaattagatgagctttatgagcccaagttccactcaatacccttgaagcctatccaggaaggatccttggcccccagttttagaaatacttatgaactggagagaagccacccaagtcttctgatccatctttccccttttcccctgtgaacactgagacttcattactctaggtggactggctagctctcttcccttctgaatcctgctccttcaagtaagcctttcatctgcagaagatttcaaaaaaataaaagaccgaattcaaggtaaaccttgggtaatggtgctctgaagtgcagtggtgtctagttatggaaaggaacaaacacccctgccctctgctctgtaagtggcattctaaacccaccaagggacttgcccagtcctccagcaagtcctccaggccctgctgccctgttatccttggggttgcaggcagcaaagttctagggaactcaggtcccagaaaatgcagtgattctgaatgtccaacacagacttcatattccaaagggatactagttctcatgttactataaatccttcgagacagagaaaccaggtaactttatttctcattgtttaggattttctttttattatcaaatctctgctatagaaacactgaagaaaatgggaaaaaaaatcactggagaggcagcataaaatggtggctgaaaacaagaactctggagccaatctcagctctactcccttactagttgtgccccttaggtaggatccttcaacatctctgcttcagcttagccatttgtaaaactggggtaacagtacctatctcagagtaaaggggactaaacaagttaacacttggaaagcatttaaaagaaagcccagcacataagtgttatatgtatttgtaaaactttttaaaaatctcaactgggttaacttttccatggatctttcaggtccttacccatatacatttttttagatgtgttacagtaagtatgtatatacaattctgtatcctttttattccttcatgttatgtatactgatgcagtgtccataattataatttatagtgattgcctaaaacaaattacaaactaattgcccaacaatgcagtgatgagtaacaatggacgctgacacactgggctaaggatcactttctgtccagcaacatcagtctcacactcctaggcaataacttttctaccgttagtcatctcattcattaattttctctaaggaggttaatcaacagtaaataccccattcaatactattatttttcttacattcagatttagcacttcatattctactcctgggcacccagaccctccccttataacaacaaaatctgtatttctacaattatgcacaaaatgttattgtagagttttccatccagtactccagcttgatgcaaaacagtgtatttccagtcaaaaacttttctctgcataaggtttttcccttagcaattcacaccaatctacaattggtgagagctcttgctaaaagatgcctcattccccacagtcatggtcctcaagtatgaattactggtagaccataaggggagtttagagtttccttcattgttaattatctgattttgagtaagggctaaataactgctgaaagcttttccctattcttttccttcatggggtttcttctaagatgatattttctagtaaataatgtgggagaagtcttactgaactcttaatgaaaaatgtcccctcttgattatgtttatagggttttcctcaatgtgttgtcaaatgtacaagaaacgaaaaactcgcataaattcaattcagtttctcttcactgtgatttctctggtgttgaagtagggctgagtgaccactaaaggcttttccacattcactgcatataaagcgtttctctccactatgcattctctgatgaataataagggaagaattcttacaaaatgctttttcacaatgattacatttgtagggcttttctccagtatggtttcttaggtgtacaataagggatgaactctcattaaatgctttcccacattcattacacctgtatggtttctctccagtatgagttctccggtgtgcaatgaggtgagaactacagttaaaggatctttcacactgattacatttatagggtttctcaccagtgtgaattctccgatgagcaacaaggtgacagctctgactgaaggattttccacatttattgcattcatagggtttttctccagtatgagtcctttgatgtctaacaaggtgagccatctggctacaggattttccacatttattacattcatagggcttaattccagaatgaattatctcatgtttagtgagggctgagcgttctctgaatgctttgccacattcctgacagttatatggtttctctcccgtgtgagttctctgatgggcaataagatgggagctccagctgaaggattttccacattcagtacatttatatggttttgctccagaatgagttctttcatgtttactaagggctgagtagtccctaaaagctttttcacattcatcacatttaaagggtttctctccagtatgcattctcatatgggcaataagatgggagctccagctgaatgatttcccacattcagtacattcaaaaggtttctctcctgtatgagtcctctgatgtccaataagatgagagttccagttgaaagatttcccacactcattacaaacataaggtttttctcctgtatgaattctcttatgtacaataagatgagaattccagctgaaggcttttccacatttattacattcatagggttttattccagtgtgagtccgttcatgtttcgtaagggctgagcgattcctaaaaacttttccacatttatcacattcatagggtttttctccagtatgagttttcttatgttgaataaggtaagagctccagatgaaagacgtcccacattcattgtagtcatagggtttctctgcagtgtaagtgcttgtatgttgagtaaggaaagagtcatacccaaagactttctcccattcattgtatttatacgctttctctacagtaccaattttttgatgttccataaaggatgagaaataaaagatattctcatattctttgtaattatactggttttctccaacatgaagccttgggtgttcattaaatgatgggctctggttaaagatttgatggcattccttatattcatagagtttttctcctgtgtgaattcctttatgatcaccaaaatgtattatatgattgaaagatttaacagcatcagtacatttgaaaagattatctccagtttgtattcttgcagggtaaataggttgaatggactgataaacagttttgtcataatcattattttcacaggtaaccttatctgcatacattatggctgagtcacatctccaactttgagcatgtgtatcaggcttatagaaatgttctatctgagaaactctctgagatggaacaaagtttaagttctggctaaactctgccccaagtccacagaattcagagcttctctgggatagtacttgcttttgcatgaagaccatctgcctcatagctgtactctggttcatgtggtacatttctaattggtctttacatcccaaaacttctaacctggagaaccaaggatcatcccatatatatctttccaacttcatgccatgggattgttcttcctcaaaaatgctctgtgctgggatcaatgctttgctttcaagatttctcacccattctgaaacagacagaaaaaaagctatgagagcatagagaaagacattagaataaagtgggaatggtgagatttactgtccatattatcaaaaacactagtataaatttgttttcaagtccaggcttagaactcagagaaagatcataatagggaaaagaatagtgaaaagtaaacaacagttaaccagaatacaaagtgtgtactgaaaactaatgaaaccatttaaaagtactttccatgaaaaggaagaccagtataagaatgtgcaagaaagaggccggacgaggtggctacgcctgtaatcccagcactttgggaggccgaggcgggcggatcatgaggtcaggagatcaagaccatcctggctaacacagtgaaaccctgtctctactaaaaatacaaaaaattagccaggtgtggtggcgggtgcctgtagtcccagctgctcaggaggctgaggcaggagaatggcatgaacccgggaggcagagcttgcagtgagccaagatcgcgccactgcacttcagcctgagcgacagagcgatacaccgtctcaaaaaaaaaaaaaaaaaaaatgtgcaagaaagagttaactctgcaggcctgacgtgctcaaaccttgcaaaggtagcctgtttcctaactggcccttagccaactcctaggaattaagatcttggaatgttctaactagtaagagtgttttgcatgctcaaggtattgaagcacatttacttttaacttatttagatatgtgtgcaaacaatgtcattcatagtgatcacctgctttccctcagggtggtctggagtttcagcgatggcagtgagtcacgcaggcactgtgtgcctggatgagcaacctctcaataaacacactggactcctagactcaggcaagtttcctagtagaaatttcgcacgtgttgtcacaactccttgcttgaggaattaagtgtgccccatgtacgctactggaagcttgcacctggtctaacctcatgcacctttttcctttgctgatgttgctttgtatcctttcactgtaatacaccataatcctgagtataatgacttttgagtcctataagtactcatagtgaatcagtgaacctggaggtggtcttgaagacccctgacaaaaggacccagtgaatgttattaaggttaaaaaagaaaaaaaaagaataaagcctttcatcttaacaaaagttaggtagatgagcacacaaggcctttagcaagtaatatttacatcatgagtgctctcacttctgtgttataatgtccttctactcccatatcttgacaagtgcagaaaaaaggaggagaggggtgtttagagagtatcaccaagcgaggcttcaagccaggatgttatctatgacaaaatgctttgtttcctatgtcacagaatccagtcaatcacacaagatccaccaacccaaagggcaaacatcaccagagtttatggatacccctaaagttacacttctatccaccacagaatatttttagagcaatgatagatggactaggaagacagcatagtgtgaaaaaacagacacaggagttacagtctgctaatctgtatgtgaacaatggccctgctgctatccttagagagcttttctgatgactaaagtcgagactcagaatccagccaaactcctggcaagtttaatacacaggaactgcctattatcactgcttaagtatcaatcctctaacaaccaaaggaggctatattagtttctttctgctattgtaacaaattaccacacatttagtaacttaaggtaacacaaatttatgatctttccgttctggaagtcagaagtccaaaacggctttcactgggctaaaatggagttattggccgggttgtgctccctccagaagctctaaggaatccaccatatccttgccctttccatcttctagaagctgccccaattccttggctcgcagctccttcctccatctgcaaagctcatcactccaacctctgcttctgtcatcacatcctctcccatgtctctgaccctcccaccacaatcttataaaaggacccttgtgagtacatttagaatccactcagacaatccaggataatctccccacagcaagatccttaatttactctcatctgaaggtcccttttgccatacaaggtgccccattcacaaattctggagattaggatgcagatatctttgtgggggaagtcattatccagattgctacagggtctaaagccccaggcaggtcccaacaagaactagaccttgccctctctctctgcttctttttttctctttactatatgtaatttccccccttttaccacccaagtccattattttttgtttaatttttttgagacagggtctcactcaggcaggagtgcagtggtaccgtcatagctcactgtaatctcaaattactgggctcaggcaatcctcccacctcagccttccgagtaacaggactacaggcatgaatcctgtatatacaaccatgcctggctaaatgtttttaaattttttatagtgacagggtcccgccatgttgcccaggatggtctcaaattcctgggctcaaataatcctcccaccttggcctcccaaagcactgggattacaaatgtgaacccccatccctggcccccacgaccattataacagaggttctactctgcacaactggcatttattatcaatttcaagctcagctcttaaaagttactgaattatcttcatatagatttttaaatccttccagtaaaagctttttacaaatggaagctgaccaattccctgaccaaatgaaagaccaactgaaagaccaaatgaacagttcttgtccaactttatactcactcagtacttgtagtctactgagtttccagcaccagagacaaggcaagaaagtacggtctccctggaagtcagaatctatgtgaagagagatcctaccaaacagtgatgaatatacatgaaatatcactctgaggtcgggcatggtagctcacgcctgtaatcccagcactttgggaagctgaggcgggtggattacctgaggtcaggagttcaggaccagcctggccagcatggtgaaaccccgtctctactaaaaaaatacaaaaaattagccgggcatagtggcaggcgcttgtaatgccagctactcgggaggctgagacaggagaattgcttgaacccgggaggtggaggttgcagtgagccaagaccacaccattgcactccagcctgggcaacaagggcaaaactccgtctcaaaaaaaaaaaaagaaaagaaaaagaaatatcactctgagatggtggggttatagaacagatgctaagtgggtgggagatcaaaaaaggacatcagcactaactgaagtgatcgaggatggttcacacaagagaaacaacatgagctcagccttgaagcacgacctgggtacagactgactagtcactcagcatgagcagaggcatgcatggcgtgaccagtgtgtgaggaggaagataaggatacctgctgaataaaactccaggagctattcaggaaatgagagaaacaatagaaaaaatagaaggttttgaaatccagttgttttgttacaaggcaattagaatcactgtaggtttactgacagggatctcataatcaaagatttcagggatataaatctagaaatagtacctgaggtggctaataacaagtgagaatttcctcatcaacttgggctggaattttacgagaaaggggccggactgtgagagtgatgatggaagctgaatgacgtaactaacatttcagaggaagaaaatcttgggagttagaagagagattacttcttggagaggaaagagctcgaagtcaagatgacttctcaatctccagcttaggggacatgcagaaatgcacctcaggaagatgggagaacatctagaaagtagagacaagattactggttctatcggctgtgatcaaggagacaggtgagatgctttgtaaaatgggagaagtgtaaggacagaggtgctggaattgcagggctctggatggtaactaagaatgggcagcactgaaggtagaagaattaaagctcctggaattcatgagctcttaggggaaagtttccaatctgaatggaaaacaactggagagattctccacaaaagtcccctccattagagtgggtggaagataatccaacttcaggactcaagaagaggctgtggcacattgccaaaaataataagataaagacaatgtgtataatctcctattgttgaaaacatgaaaaataactacaaattcctacatgcttgtagctgcataaagaaactctgttatgcatgtaacagaaattactaaaagtgattacctgaggcagaatgtcagtgaaaatggccaagtaaagacatgtaaaatttcaccactctgtaaaaccaactaaaaaactggcaaaactgtcagaaggcaatttttcaaaattctgtaaattaaccaaagcctaggccaggcgcagtggctcatgcctgtaatcccagcactttgggaggctgaggcggacggatcacgaggtcaggagatcaagaccatcctggctaacatggtgaaaccccaactctactaaaaatacataaaaattagccaggcgtggtgtcgggcgcctgtagtcccacctactaggggggctgaggcagcagaatggcgtgaccctgggaggcggagcttgcagtgagctgagatcatgccactgcacttgagcctgggcgacagagcgagactccatctcagaacaaaaacaaaaacaacaacaacaacaaaaacacaaaaaaacaaaattaaccaaagccttgcagcaaccaggaaaacatgtattctagaaaagtaaattttaataagaacagtaagctatatggtgttctaacttaccccggtcccatctctggctcagtaacagccttggaaaaatgacagcccccacttctggtacttcagtgagcagaacaaagctggagctttttcaaagcctcattctcaaagaacactcattactagacctgcctagtggctccctggaagactccactggaaaagctggtctttattttgcctgacagagaactctcatagtgttacaaaacctctagggaggaggtacttttctaacatttacaggcaatgttttaaagtcaccactgcctgaggtgatggcaaacaggtggggcccaaaacacacgagtcaaaaagatagaatgaaagagctgaggaatgagatgtctatagggactctgagaagctccaacctagaaggctacatgcatacccataataattaaactagggccaggggtggtggctcacgcctgtaatcccagcactttgggagggcgaggtgggtggatcatgaggtcaagagattgagaccaccctggctaacacggtgaaacctgcctctactaaaaatacaaaaaaaaaaaaattagctgggcgtggtggcgggcccctgtaatcctagctacacaggaggctgaggcaggacaatcgcttgaacccaggaggcagaggctgcagtgagccaagatcgcgccactgcactccagcctgggcgacagagcaagagtctgtctcaataaataaataaataaaataaaataaaagccgaagagagaatcctgaaagcagagagaagaaattcatcacgtacaagggatcttcaataagattaacagcttgtttctcagaaacgactcaggccagaaagaaagacaaaaaaacatgacaatcaagaattctatacccagtaaaattatccttcaaaaatgaaggagaaatcaagagatttccagataaacaaaacgccacagttcactgttagcaaacctgtccgacaggaaatgctggctggggatagtgactcacgcctgtaatcccagcactttgagaggctgaggcaggggcatcacttgagctcaggagtttaagaccagcctaggcaacacagtgaggcgtggttgtgtgcacctatagtcccagctactcaggaggctgagatgggaggatcacttgagcctagaaggttgagactccagtaagccaagatcatgccactgcactccagcctgggcaacagagtgtcttttctatctcaaaaaacaaaatggaaatgctaaaatgagttcctcaggctgaaatgaaagaacattcaacagtaactcaaaataaaaaacagcaataaagatagctacataagtataaaaagacaatataagtaaaattcttgtttctagctcctttttttcagtctgttaaaagacaactgcataaagcaataattataaatccatattcatgaacacacaatgtataaagatgtaatttgtgacaaaacagcataaaaggaggagggcagagctatacacaaagttttggtatactattaatattacactagtattaatccaaactacattgtcataaattaagatgttaattgtagggccaggcgtggtggctcacacctataatctcagcactttgggaggccaaggcaggaggattgcttgtgcacaggagttcaagactagcctgggcaatatagtgagaccttgtctctacaaaaaaaaatttttttttaattaactgagcatgacggtgcatggctgtagtcccagctacctaggaggctgaggtgggaggactgcctaagcttgcaatgcagaggctgcagtaagtcaagattgtactactgcactccagcctgggcagaagagcaagaccttgtctcaaaagatgttaattgtaatccccagggcaactaccaagaaaataactcaagattttatagtaaaagaaaagtagttacctgtgtgtatgcctctgtgtatctgtgttttgggggaataacagtaatgtgagtaacagcagggagtaaaaatgagttatttttggtggtgtttttcagacagggtcttgctctgtcactcgggctggagtgcagtggtgaaatcacagctcactacagcctcaacatcccaggctcaagcaatcctcacctcagccccctgagtagctaggaccacagacatgcaccataaagcccagctaagttttttaataaaggagattttttttttagcttatacattttaagtagctttcagatatttgaacattacctatattttaaaaatctattttgtttggtacccacaagatctaagtaagaaagaacaaaagcccaagccgggaacggtggctcatgcctgtaatcccagcactttgggagcccgaggtgggcggatcacttgaggtcaggagttcgagaccagcccagccaacatggtgaaaccccgtctctactaaaaatacaaaaactagccaggcatggtggcgggtgcctgtaatcccagctactcaggaggctgaggtgggagaatcgcttgaacccgggaggcagaggttgcagtgagccgagatcgcaccactgcactccagcctgggcgacagagcgagactttatttcaaaacaaacaaactaaaaagcccaaaaagactatttttttgaaataagcatctatagctataggttacaagtttggcaatacaggaaataaggaaaatatttgaagtagctacatggataagaggtaaccttagaggcaaccttagaggaagggaccgcagaaaacaggagccatcaagagccgacagcgagggaaaatggctaccttattaggatggtgatgcttctttgctctaaatcaaaagcagcaagagaagaaagctccttagagggaattctaaatgcatctgaggaaggtaactcttcatggccttatcccatttctcaacaaagagggcttggggggaagttccttgttcagcctggggtctgccctcacctggacaagtgcgttgaggacatgcctgctccactgaccacggctcttctccttgctccaacagggagatgacctcaggcttggcaatctgatttcctatgcatggaggaaaagcatggaaatcatgtcatgaggcttcaggacagccaaagaaagcttctcttgcctattcctccctgtgacttctcaacctgggcagaatatgcaaggtccttcccactccatgctctttaagcattaggagtttcatccctgaacctcagggcccaagatcatctcagctcttctgagacaccaccctcgcccctgcaatgagcttctaaacatggagcagctgaaggcattaccatgggaacagcttcgtttacttgggcagcacctgccttacccacagagagcaggtgaccataggtctccagcatcacatcacggtacagggtcctctgaacaaggtccagctgcccccactcttcttgggtgaagtccacggccacgtccttgaaggtcactggttcctaaaagaacacaaacgttccttctcagcctgtgaccaccccctccaatatttccagggatggagtgaggctgacagccctggggagagaagacaggatgtagagaaactctcctggttattcaagagtctgactaatgtgagtcaggtctcattgagaaccacccaagacctcatatttgttatatactcttagggaattagatacctgggtccacaataaccacagcaaagctgagcaggtctcttcgaagactcttgccaaattccagcacactggctatgtcccccaccttggcaacacccctcttctggaaaggcagtcatataaaaaggcctggaccagtgcagcaacaggctatgagcactggctacaagcgagaccttgaggatggagtctttgctccgacacccagataaaggacctgaaagggtgatctgtacattcacaagttgtctttccagccatggtggggaggtttccattctcagttcatctctgtcccaaggactgaagctaagggtgagcaggatgccccagagcagcccaggccaaggagaatcggttacagctgccattaaaagcacattagttacaagcaatctaaactgatttttttttttaatgaaagcaagaaaactaactggaaaacgagaaggaaaaaggaaaggtaatctaagtctgatttttccaatgaatacatccctcaagtccttttattattattttttaattattttatcgagacagagtctcgctctgtcgcccaggctggaatgtcatggtgtgatctcagctcactacaacctctgcctcccaggttcaagtgatcctcctgcctcagcctcccgagtagctgggacaataggcgtgcaccaccccgcctggctaatttttgtatttttagtagagacagggttttgccatgttggccaggctggtctcgaactcctgatctcaagtgatccgcccaccttggcctcccaaaatgctgggattacaggcatgagccactgcacccagcttcgagtccttttaagaaatcaactcgccaggcacagtgactcacacctgtaatcccagcactttgagagtcctaggtgggcggatcacgagctcaggagatgagaccatcctggccaacatggtgaaaccccgtctctactaaaaatacaaaaaaattagctcagcgcagtggcacacgcctataatcccagctacttgggaggctgaggcaggagaatcgcttgaaccagggaggcggagcttgcagtgagccgagatcgtgccactgcactccagcctggatgacagagcgagactccatctcaaaaaaaaaaaaaaaaaaaaaaaaaaaagagccgggcgcagtggctcacgccggtaatcccagcactttgggaggccaaggcaggtggatcacaaggtcaggagattgagaccatcctggctaacacgcggtaaaacatcatctctactaaaaatacaaaaaaattagccaggcgtggtagcaggcacctgttgtcccagctactcgggaggctgaggcaggagaatggcgtgaacccaggaggcggagctggcagtgagctgagatcacaccactgcaatccagcctgggcgacaaagcaagactctgtctcaaaaaaaaaaaaagaaatcaactcaggccaagtgtggtggtgcacacctgtagtcccagctactgggaaagctgaagaagtgggaggatagcttgggcccaggaggtggaggctgcagggagctgagatcgtagtactgcactccaaactgggcagtagagcaaaacccagtctcaaaaaaaaaaaaaaaaaaaaaaatcaaccgcaagacacccgctcaacagacacgtgtgcagtataccgctcccactccaagggtcctctggacctgtgcccctcctcttcacagctacatcatatcacttctacccaaatacagcgtttcctgtggccctcttagtcacagcttatgaactgagtttgctgtctctgatctgggccagacctccctgctgaattttcagtgtatccatttttactctgtctcaattgcttcccctctaccttcacatgatgggcttaaaacaaagaactgcttctgctccaataaataccataccctgaaaagtcaactcctgctcaagaccccccaggctcagccttactgtgccccatgacaaggactgtccatcctcttttccacggctgaacctcatctctgtgtctcacaacctcgaagacacagaatcatccctcctgcagcctcacaccccatgtagagacgcctcctgcaccctcgtcccactgcttctgacagtccatctcctcctgcaaggtacagtgcaccctcgccttctctccttccttgtcttccagccttaccccagtgcagttcctcctctgcctttattatccgttttcctgttccttggtattggaaattttttctttatatttatcatttttgctgatctatattgaaggatcttggagcaacaattatatgattcttatttttaccaagctctcaccaagatctccccaatgtcttgtgattgtcaagtccaaagtttgatttctgcctttaccttcttggcctatgcagcatttggaagtgctggccacaacctccctctatgaaacactccccaacccccatggtcaatgacaacttcttggttttcctcttacagactgcccagacctcagtatgcttgatgactactgtttctacattttatggtaatgtaaggtttttttatttaaatgtaacatggagttgggagtggtggctcatgcctgtaatcccaacactttgggaggtcaggagttcgataccagcctggccaagatgatgaaaacccgtctctactaaaagtacaaaaattagctgggcatggtggtgcacgcctataatcccagctactcgtgaggctgaggaatgagaatctcttgaacctgggaggcaaacgttgcagtgagccaagatcgcactactgcactccagcctgggcgacagagtgaaactctgtctcaaaataaataaataaataaataaataaataaatgtaatatggccacagaagtgcacaaaacctatgcttgatgcactttcacagagcaatggcacctggggaaccagctaggcagctgtgctgatggcccagggtgcctctgaccctgtgcttgtcttacacatcctaacctccctggggtggcaccttcttagatggcttcaatgttcacctacacttaacaaggtgcaaacccacaccctaatggctgaccagctggtagactaagccacaaattcacttcccacccctcccaagaccccaatggaatcattatatgttcaaaaatagaggaattacatctaataaacacaagaggaatgaaatcattggagcagttctgcagtccctaataaaacagtggacagtggcaatgaccatcaatgactgctcagctgcaggtgaaaggcagacagggagctttataatggaggggtcagtctgacaatacctgcacccactaacccatcatacctgaagatgggacaaccagacaccatgtgcccactgatgcaatgcagtatgaagaacccagcaccacctatgaagtattcttatcaaaaataccaaatgaatctactcaggcctctagtccaaatactagctaacaggagacgaggggatggaggaacttattcaatgacatcatgaaggcaaaaatcaggcaaaccaacaagaccagtgacctagtttcttcagcatatgaagcatgtgcagtgtgtgggccttgtttggatcctgatttgaacaaaccaacaactgtaaaaacatattttagagacacatagagaaaacaatatgaactggatatcaggtgacattgaggaattattggtaatttgctgagtatgataaaggtattgtggtttcttccttaagggtacatatctcttagatacacagaaacactcacaggtgaaatgatacaattctgagatttgctttcaaatcctccagtttaaaaaaggttgtgttggaatagatgaaaagaaatgcagaaagtggaaagctgacagctgctgaagctggtcaacatgggtgcttgcagcaggctgaataacaccccccaaaggatgcccatgtcctaatcctagaacctgtgactgttatcttaatgataaaaggaactttacagatataattaagaatctttagagggattaccctggattatccaggtggcccagtgtaatcaccaaagtccttatcagtgagagagggaggcaggagtcagagtcacaggagatatgacgcaagcaggggtcagagtgatgtactttgcagatggaggacagggcatgagtcaggaagcagtctccccttgagcctccagaagaaacacagccctgcagacccattttagacttctgagctgcagaacagtagaataaattcatgttgttctaagctataaagtctgtggtagtctattacaatagcaacattaaactaagacataaaactaaactaatacagggttcatcttctactttggggttcaaaaatctcctaaataaacagttggctttttttttaaagaacgttaaagaaataacccagccagtgaaaaaaaatgggggcgtcagcaccttgaattccacttattcctccaagaggcagaacagatagatgaaggtaaggctgaccaactagactagaagcgattccagccccacactaggaggcaccacggtgaagcaggtgcttcctgcaagaggactctgggagaggcaggagtgagtcaggctgaaaacagggcaggtgaaagtctgcactcgcacagctttgcaagtgcctgtgggtagtactgccagcagccatgtacttatacacgggcaaaagtcccaggagcctcctcagacttgagaccgcggctaggttctcaggctgcccaggtgagtggagacctcttcagtcccaccaggtggggaagagaagggagtctgtggcctcacagctctatatctatgaaactggaagcagaactgaccagctgaccctggcccatgcaggcccacgaaacccagggcatgcctcaccaggagcacagagcggagtggaaggcaccaatcatgaatcagatctatgcagctgaagtagaacaggacttccagcctcacagccctgccctgagaaacacacacagaccagacgtctcctggacatgagaaacacctgatgcacagataaagcgactgaactaagtagccacaaggccagagaatccagacaacagccacattcaactttcaaagacctgttaattcctattctcagattctcagaccagagtgatttcagtataaagtgggacaggatgctacaagagaggctgagagaataggaaagccttcacagactaagaaaagaacagaagacacagcaactagttcaggaggccctagagagttctgctgtggtgagaacatgatcatcaggcccccaacccccaccaagaaaaggacatggaatatagagagatcagagacacggcaatttgttcaggaggtccagcagctaacagaagagcccagaaagagaacctaaaggaaaaggacaagagggaattattactttttaaataacacaagacttcttaaaataagacacacagaaacactagccataaacaaagatagacacatttgacaaaaacataccaacattcaaatatctgactgataagacaccaccagttaagacaagctacagactgggaggagttagttgatatgtgataaagaattaggattcagaatgcatgtgaaatacctatattaaagtcagtccctagaaatctagggatgggggaagagaaacaaagagagaaggaaatacagatggccaataaagacatcaaaaggtacttaagctcactagcaatcaagaagatgcacattaaaggaatgcaatatacctttctggtcctgaggtaagcaaacatttaaaagacctgataatgtcaagtgtcgacaaacatgcaggaaaaggggtattttctcccagagtggggagactgacaagtagcttcgcccccttgtagagacatgcggcagcactagtaacactgaaagtatatacctagccgggcatggtggctcatgcctgtaatctcagcactttgggaggccgaggcaggtgaatcacgaggtcaagagatggagaccattgagaccatcctggccaacatggtgaaaccctgcctctactaaaaataaaaaaattagctgggcgtggtggcatgcacctgtactcccagctacttgggaggctgaggcaggagaatcacttgaacccgcgaggcaaggttgcagtgagctgagatggcaccactgcactgcagcctgggcaacagaatgagactctgactcaaaaaaaaaaaaaaaaaaaaaagtacatacctaaaaccaggtacaattctgcttctaggggtatgcctagataaaaactacataaacacgtgcacaaagtgaagtcacaggaatgttcacacagctttcactggagcagcaaaaacaatgggggaaagaggaacttataaacctgcccataaaagaaactatgaacacagaggtgcacttctctaatggatacactcggcagcgcaaaaggaacaagcctgacttctctgtatctatcaacatggatggacctcaaagttgaaaaaagaaaactataggaaaactacatatagaaaaaaatcattgggaaaaaaaatagattgttgggctgggtgcagtggctcacacctataatcccagcactttgaggcaggcagatcactgaggacaggagtttgagactagcctgcccaatatgacaaaaccccacctctactaaaaatacaaaaattagccagatatggtggcacacgcctgcaatcctagctacttgggaggctgaagcacaagaatcctttgaacccgggaggcggagactgcagtgagctgagatcatgccactgcactccagtatgggcaatgcagtgtgactgtctcaaaaaaaagaaaaagactgtctatgtctatatagtttatcatctatgtatgcatatgaaaatgaattagctgtgtacaaactgaatccatgagtggttgcctgagaaatggtggaaagacaaagagtaaaagaagaaaaacaacaaatacgacaaaacagtaatattgttcactgatggtgatgccatttgcttcctttttacacttctctgtaattatgaaatgtgccaaaattaaaactaaaataaatttttaaaaatttagaaatgaaaaaggggacattttcaaactgtaagccccatgggctaaaaaacaggaagaaaaaaagagctgcccccagctgaatatgtaaccatgtctgggcccacaaatcatggaggcctcacctcaaggatggtaaggggactgggcacaatggctcacgcctgtaatcccagcattttgagagggcaaggcaggcaaatcacctgaggtcagaagtttgaggccagtctgaccaacatggtgaaaccctgtctcgattaaaaatacaaaaattagccagtgtggtggcacacacctgtaatctcagctactcgggaggttgaggcatgagaatcccttgaacccgggaggggaggctgcatcaagccaagatcgtcccactgcactccagtatggacaacgcaatgagactctgcctcaaaaataaaaataaataaatggctggtaaggggacacagtaaacaccttcagcctagaattgcaaaggaaaatgcaaaaccaaaaggccagaaggaagagatggtggaagacaggaacctagtctcacaggctgtggagatgagagggacccttcaagggtaggagaggaaatgcaggtttcactgttgcctgatgctaaggggaaagggtgctaaagagagaagagtactgctacagggaggagcaaacccttctggtccacaggtcaccctcatgagctgcatttgtattttccaatcacatcctaggatgacttgcaaaagtgtttcacccaaattctcataaacattcttgcacacatcactttgtacacacatataagcatttatctaggcattctaagcacttcatggaatctgctaacaaaccagccacacatttaaaccctttgagagtctgaaggagagaccaaaggtgctgagctgggtctcagatgtttgctgacagatcttgcccaactgctcccccttcaaggaacctggggcaattcagatggcttctgtggtagatttcattgcagagaaggaaaacataaatagattgtgcacatcctcaagtctgaccaagcatgggtgcagactattattggtgttttatgtacataatgtttgttatgcagatatcctaggtggactgttaacagaggggtttgaatgcttccgtatttggaaaggctggttggggttttttagatgaaatgagatattatcattacaattattattttcccctattcctagaaataacgggatctgggcttctgtagttaaaacctcactattcaacatacttccatgaatggactattcagataatgagggatgacagcatttgatgttttcaccagataaatgctttatttcaataaatacttaacttggagggaacaataaagggacacagggttcttttgcattcctgaagatctcacttagttaaaaacacacagcagtcaaatccgagtttcccacaggaaaaaatccagagtgtggggaggggggccagccaggagcatgttatcagaaatcacaactcttcagacattggagggtgttgttatttttaattctgttttattttctcagcattaacttagataattctcagaaagcctagcataaattaacagcagagtgtagcatggtggttaacagggcttcttcgcagtgttttattacagctaacttctactcctcagagtctgattcaggggccatctttcaggctagtctagcttcactactgattattctgtcttaggatttaataatgactgtacattgtaagagcagcaaacctcatagttgcccaagttctgatgccaggcaacaatcaccttgcatcatatggttcaggcccttctgcttcccatctcacctggaccagggatagcaacactgccaagtgggaacagcatacttatgatggacttcacccaccagatttgaaactgtgggcggtttcaataatattttttaatttgagggggaggcacaaagtagagacatcatttttaaatcttgttttatatccaagtatctcacatctgcttgattcattatcttaacttaaaaataaaagacctaaaaataagtaatgaaactctttttcttcatctttcatagcagggagttaacagagtaaatataactttaatgaattaggaaaaaaccaatttaaaaaatctcccatttagaaatacagagacaactctaaaaaactgaaaacaggaagttaaaaatggctgcctcagtcattttttacaatgtaattacattgtaattacacttattacatttacattgtaattacattacattaaaagaaatattgacacaatgctacaatatgggtaactcttgagaaggcaaacattatgctaagtgaaaaaagccagacaaaaaaggctgtgccatattatgattccatttttatgaaatgtccagactaggcaaattcatagagacagaaagtacactagtggttgggagggagtaggggaaacagggagtgactactaatgggtacaggatttctttttagggtgatgaaaatgttctagaattagatactggtgattgttgcacaattctgtgactatacgagaaaccactgaattacacactttaaaaggataaactttataatatgtcagtaccatctcaataaagctattataaaaatttttttaagtggctgcatctggtgaggaggctgggcaggaggacggcagagagatgacacctttcctaagtaactccattgtcctatttctctcaggagccaccctgtccccataatcacaaaggcccctgctttgatttccttatacctctcctccatagctccaaggccctggtcagactgaagcctgaaacaccagcctgcttcccacagccctcttctttccacacccatcaccacattttggaccctggtgccgcctgatcccaagacttctgaggttctgcagcaagcattcagggcctggcctctccagcctaaaatctaactggagtcagtctcactcaaacactggtcacacagtgtgctgcctgccacccctgacccctgtggtgctgcaggaggccagacccccactcaccaggctgtgcccaactggctgatgcattcttttcacctcttggcccaggtctacgaagcagccttcccctccacagtaaaagctgagctccacacagactctgtcccatctcccgactcatcaggtgactgtgctcctgcaggcctaccctacccgtctcaggtttctcctgtcccacactgcacgtgtggctccaggtaggccgtgagatctccttagctgagtgaataaccctggaaaagggtctgggagctcctcagggtgaaggctcacacctgtccttgttcccttcacagcaggcacagcaggcactgcacagcatcagcctaaatcgggtgctaaagacatgagtgaaggtggcaatagagaagtggggctgccagccaaaagggctgcccttcatgccccacaacaagccagggagagttggagctcagtactgtggacagactggttgacactaaggctccgaatcactaaaaacggcctaattctccctacctgctctcaggaaggattaacttccagttgcttccttccctacccaaactccaactgttgtaaactggagagccgcatcaactgggatgaccagggataacctggacatcatcctctgggaacaggacagccccatctcacctgaacctgggctgctgggagcccagtggccctcctcccctcctccaggcttccctccacgtgccaggcaggatactgaggacacagagctaggaaacgagaaaaaagtcatggaggcagctctcgctgccaggagctcaccttttcttctggggggctgagaaccagcccctgcccctcccccttgaatgaggaaagagacccacttcctcattctatagatgaaggaattagggctcagagaaggttaggaaagtacctaaacacatgaatctctcattggccccccctgtgctattgggtaccatctctgagaagcagtgtctggtcacaaccttcctgggcctgaaccctaaacggccacacatgaattctcatgcatcttgagatgtcaccatcaccttactgctcactggttttctttttttttttgagactgagtctcgctctgtcgcccaggctggagtgcagtggcacgatcttggctcactgcacgctccgcctcctggcttcacgccattctcctgcctcagcctcccgagcagctgggactacaggcgcccaccaccacgcccagctaattttttgtattttgttttagtagagacggggtttcaccgtgttagccaggatggtctcgatctcctgacctcgtgatccactcgcctcggcctcccaaagtgctgtaggcgtgagtcaccacgcctggccactagttttctgattcctccttgttccagctctgcacagagacagatctggaccacctgccctaaagccccacctggtccccattctattccccagctgtggcagagcactacagccagaggccacaatatggcagcccacagctgaccaggctcttgactcaccccaggaggcccatgggtcaacagctgtcatcccccaagattggtccgtaagggcacctgcacagaaggatcaggttaggactgtgacaccaaacctagtgattcaaggcgacaaaatacaagaggaggctgactcgctaatgggcactacaaaattccataaacagagcccaagggtgtgtaaaaaaaatgcaacataagctggattcacacaggcaatgcacaggtgagtcactattaattaacaccgttttaaaattaccaaccaatgctatataagtaaaaacaataaaggtaaaaatatatatgagagcagtagagacaatattttattatatgtatcactgttgtttaggaaaccccacaaaccaccagaaaaatcccttaaaactaatgacacctctcaggagatgactataaaacataaaagttagtgtcttttatgccaacaattttcctcctttaccaccaatcagttctaattttgtaccaagatagacagacccccttccatcctcaaaagtcctcagcccatcaccagctctgacccatgactgcagcagctaatgataggggaggcccaggagaaacacaacttggactcaccccaggaggcccacgggttgatggctgccatcccgaggactgattgaccaggcacctgcccaggaacacagcaaatcccaacctagtgacaaaagtgaaaaaagacaaaactagtcctttctcacagaagaccaagtgggaacaaagaagggaatccatccaccgaagcaacaaaaaaacttgtaaggagcatcgtaagaaaagagaatttacatgtcaaaaaagtaacacaattcctggagagaaatgaaaggtaatttgcataagctggaaaaaagagcatgatcctgaatgagagggtacaaatttgtcagctattcccaagagacagccagtcacaacacagatggaacttttggattaatctgacaattattgtaaaatcaacttgcaatcctcatatattagtggttgcctagagctgggggaaaaatgaaatggggagtgactgcttaaggggaacaagggtttctttgtggggtgatgaaatgttctaaaattagataatggggatgattgcacaactttattaatatacaataaaaccggtgaattgcacacttttaagtgcttaaagtgaacattatgttatgcaaatttaatcccacctccaaaaaaaattcacctccaagatttactaagcctaagcttgtgtgtgtgtggaggacttagagatgggcctggcgcccagacccctaactcctcaggttccagatctttgtacaagtcagcaacctctcgaatggattcctgggtatgtgtataaagcactagaacacacagtgggcctcaggagcaccggaatcagcgcgaaaacgcagaatgcaaaccgtactttgcaccattatttgcaacttgacagtgaccgccgccgtcactgcatgtttaagggaacccggagctgtttccaacccaggtctgacgtccttcacagtgctttgtgtgaactggcagggggagaaacgacggctggggaacgaacggggttattcgtcccatcaatggcctcagaagcatccttatcacctgcttccagagctcccgacccaaatttcctcctcaagaccgacgcggccgcgacgctgcaaaagctcgtcccggcctcacctggctcgcggccggcggtcccccttgaaggcggcgcagcaggatcggggtctgcccgcctggggcgtttggcttttgtcccgcgccgaggtccggcccaggagtgcgcttgggagctcccggcgcggcctcggggacaaaggcccgcggagccgacgtgcagcagagttcacccaggcccgtccgaccagaaaacgaagaacgcccggaggcgggaggccggaggcaggctgctggctggagaaccgacggcaacgacggcgcaaagccggcgcggaaagggcaggcgcaggacccaccctgacgccgcctctcccagccggctctcctgaccccccaagccccgcagctacggcggccccacagcctgagcaaaggcctcacctcagccgcggacaatggcggctgcttccccggcgtcgaccggagcgcgccgcggggtctgctgggagctgtagttccaggcgggcacttccggcgtcgggcagcggcgccgccatgacaggttcctgggccgcgccgcctcgccctgcctgggcggggttgggacctttctggcacctgcgtcgaagccggcggcaggatggactttgttgtcccggtcccagaccaccctcctccaccgtcgcctcccactgcaaaaaggcctgggtaagtcgcggccccgcgggcctcggtttgcccatccgcaaaatggcgcctcgtggtaccgggtttcccgggaggagctcggcgagttctcagcgctctcgagggatccttccatttggcgttcgcaagattgtgagaaagtgactgctgttattctctttaagataaggaacctaattcgagctacccttctctgtgaagctcgacggctgagaacgtcagggctcgttcccaagtctctttccagaggccaggctttatgggagcatgggttaccagcgacgcaccctgtgagttttcctctatcgatatgcatggagcggttcgggagcggtggctcattcctgtagtcccagcacttcgggaagctgtggcgggaggatcagttgagttcaggagttcgacaccaccctgggcaacatagcgagaccacatctctacaaaaaaaatacaaaaattagcccggtgtgatggcgcgcgcctgtagtccccgctacttaggaggttgcggtggaaggattgcttgagcctgggaggtcaaggttgcagtgagctatgatcgcaccactgcacttcagcctgggcaacagagcaagacccggcattaaaacaaacaaaaacgggccgggcgcggtggctcacagctgtaatcccagcactttgggaggccaaggcaggtggatcgcctgaggtcaggagttccgagaccagtctgggcaacatgataaaacctcgtctctactaaaaataccaaaaattagccgggcttggtggagggcacctgtacccagctacttgggaggctgaggcaggagaatcgcttgaacccgggaagcggaggctacagtaagccgagatcaagccattgcactccagcctgggcagcagggcaagactctgtctcaaaaaaagggactgagggactgtaggtggtgataccaaagaaagcatggccatttaggaagctagacttgagtgagcagtgggcaagagagattttgaagatatttccactagtaatggaggatcattttaaaaagctggcctgtgggttgggcttttgttgttgggtggtgttggcactcactgtgggtgggcaaaggggagtagccctttcagagggagaggaaaagttcaagtaggacaggctgaattcaagggagaggaaaatttcaagtaggacaggctgaattcgagggagaggaccatgagagaggtaaggtggaaggggcaaggtgttgggacaggccccagctggcaggaaggtgaacccagtcagagtgggcactgagaggaaagcaatctatggatggtacagccacaatttccatctcaggatcaagcagagaaagagaggctggagaaggaagagtgacagaagtaagaagagagtgtctctccacttccactccagccccctacagctcatcctccagcaggcagccaagggcacttttaggatctcacatcaggtccttgcctcacattctgcactggcttcccaagtaattaaagtaaaatccaaattccagctcacagcttagaaaactcagcaggactggcctctgtcctatcccacaccccacctcagtccctcaagctcatctcctgtcattcctgcccatttctggaccccagccactcctcaaacagggtaagtccattcctgcttcagggcctttgtacgtattgtttcctcttcctggaatcttcttccttgtacagccccagggttttctttttttcatccagatcacagcacagatgtcacatcctggtaacagccagctgtgactcatctccctaattctcaattgtattactctctttttattttcttcgtatcgtaactgatagtctcatacagtacagaagccaagttttaagatatgcaatcaccaaatacctgctacacaaacctcaatgttcatataaaataagactagaattcatattctaaagagagatgaggtagctctgttcacttttgagagggaactcaaatgagagagatacctttgacctaaaggtgtcaggaaaccagatgaagaaaaacacccctgctatgatttgaatgtttttatcctctccaaaattcatgttgaaacttactccccagtgcagtagtgttgggaggcagggtctaatgggatttatggaggtcataaggctctgctgtcatgaatggattaatgttgtaaaccaaaaaataaaattctaagccccccaccccccaaccatatgaatagacccctcctctcagccaagggcattccaaagttaatttgaaaaatgagttcgggccatgatgggaagcagaagctggacttgcctcattataccctcctcccttctagaattagtgatagaacagactctttaagtctgataagaaacatttacagtctgttatctccggaggtttcatctgcttggtaaaaccttgagttccacaaccccagacattcctttctattgacaataactctttaaatcaattggcaatcagaaatctttaaatctgcctataacctggaaactttctgtaccagtatacatcttatatgtattgattgatgtctcatgtctccctaagatgtataaaagcaagctgaaccctaaccaccctgggcatgtcctcaggatctcctgagagctgcgtcaggggccactggtcaccatatttggctcagagtaaatctcttcaaatattttacagagtttgactcttcgtcaacaatgccattgtaaaaggttcatggagagattctgcatgtgcttgcattctctttctctctctctctttctttctctccccccacccccaccctccaccaccctgccctttaccttctgtcaggtgaggatgcagtgtccaaggcaccatcttgaactcatcatcgccaaatatgtgagcaccttgatgttggacttcccaacctccagaccgtaaggcagtacatttctttgtaaattacgcagtctcagctattctgttacagcagcacaaatggactaagacaacccccgagataggaaggggtaaggtaaatgcaatgagagttggggttttcgatcttagtccagtaaaggagctggaactgttctgtataaacaaagggcaaggtaattgctacatagattcttttcttattattgctgattcttatcctaaaataaaggacattgccactacacatcctctagaatgaccaaaaataaaaatacagcatcaaatgggacgacatggtgccaactggaattctcataccctgctgatgggagtataatgtggtacagtcactttggaaaaaagtttgacaatttcttataaaattatacataaacctgtactatgacctagagattctactcctgtttgttcaaaagaaaggcaaacatctgtccactaaaagatatgtacaagaatgctcacagtggcattatttatgacggtccaaaccaggagataatccaaatgtctgtaaccaagagaatggataaagaaattttgatacgtcaatttaatggattactacttagcaataaaaataattagccatgctgggcgcggtggcttatgcctgtaatcccagcactttgggaggctgaggcaggtggatcacctgaggttgggagttcaagaccagcctgaccaacatggagaacccccgtctctactaaaatacaaaattagccggggtggtggcgcatgcctgtaatcccagctactcgggaggctgaggcaggagaatcacttgaacccgggaggtggaggttgcattgagccgagattgcgccattgcactccagcatgggcaaaaagagcaaaactccgtctcaaaaaaataaataaataataattagccacatatccacacaacaatattgcattatcacaggtatagtgataaatactgtatgattccatttatatgaagttcaagaacaggcaagtaatccatgatgaaagaagtacttacctctgggggtggcagcattgactaaagaggtacaagggagtcttctggggcctggaaatgttctatatcttgatctgggtggtggttacacaggtatacgcgtgttaagaaatcatcaggctgtatacttagtgtactgtaatggcattacactgtctttcaattaaaatgtgaaagaaaaaacgggggtgtcttttgcttccacatttgtagccccagcttctgtatctcctgcgtgataatggttggatgaattaaaaggtaggaggaatagaagaggagaaaagcaataggaagaggaaggctggaagaaaagcccagctccactgtctcacttgggtgtcactgggtactggggaatttggaagcactagggaacagagaggaaggtgctcccttaggcttccacttctcagcccagtagtgagaggctatgaagctgttgccccctggtgggggacaagtgagaccagtgagagagggtttttgccttagaattgccccttccctggagacagcagcaagatgaaggcctctcaagaagtgcttcatcctctggaaaccagcggaggaaatgactttcccaagagaaggatcatacatcactcaatcatcagcaaacatttatgaagcacctgctctgtgccagaccctaaagtgaaaaaaaacaaacactgcacttacggaagcacgagataaacaataaacataagtaaattaaagagtagttagaaggcaacaactttggaagaaagaaaaaagagtaggtgatgtagtgcccagatgggaagggcaagttgccgtataaaattgggtgctaagagtgagtcagagtcacctcattgaggtgacatctgaacaaggactggaaagaagggatgcagatggctgggcgcggtgcctcacgcctgtaatcccagcactttgggaggccaaggcgggcggatcacaaggtcaggagatcaagaccatcttggctaacatggtgaaaccccatctctactaaaatccaaaaaattagccaggcgtggtgacgggctcctgtagtcccagctactcgggaggctgaggcaggagaatggcgtgaacctgggagacggagcttgcagtgagccgagatcgcgccactgcactctagcctaggcaacagagcaagactccgtctaaataaataaataaataaaaataagagatgcagacatcggagggaagagctagaacaaaagccctggtgtgagggcctgcctagtcagctgcgggaacaacagtggtcatagaggcaataagggggccagatggtagagaaagttgaaggcatcatgagggctctggcagggttctgagtagagcattgatgagctctagcctctgtatggagagtaaccaaggaaagcagtagagtcatgtgtgaaaccaatgtagtaattaggtggaagatgatagccgctcggatcagattggtgatcagtggctggattgcggacatgctgatactttaaaggtagagccaacagaccgtaggttcaaggttttgcatcataaggggcaatatagcctgtaatgttcagaaggagtcaagaaataaaggaggcctctcaatacagagctattcaccaagggccttgatggggaggaagtaagttgcaagtgtgtggagatactgctcccttctggcccaagctccctcccactccagttacccagtgttgcgggcagcaccctattctcttctgggaggtagcggaggcagagccacaccatcattttggatgcacctattatgggaggctggagtgcaatggtgccatcttggctcactacaacctccgcctcccaggttcaagggattctgcctcagcctcctgagtaactggggttacaggcgcgcgataccacgcctggctaatttttctatttttagtagagatggggtttcgccatgttggccacgctggtcttaaactcctgacctcaagtgatccgcccgccttggtcttccaaagtgctgggattacaggtgtgagtcaccgtgcccagcctggacttgccttttacctcatccgtggtgtcttttgaagaaaaagattctttagaaatgttttttctttcatagcttgtgttttatgtattactttcaagatcccaactagatctaggtcctaaaaatagtatcctacctattgtttttttaatcaacttaattgtggtataattgcacactgcagataaactgcacatgtttgaagtgagtaatgtaagtttttttgtcttggagccctgaggtaaacttttatttcttagctgacaggacttccacacccatgctcctctcggcacctttcacccagcccaagcagcggcggcccagtggtggaaaaggtgccacggccaaacggattggagactcaccccgcattctaggccggagaagcgggcgggcttgggatgccggcaggaggcaatgactctccccaggcgctgcatcctggctccggggcacaagcgcctctccgccctgacgctgatgctcgtctggctgcccgttctttggcatcaaaataccagacgatggtggcgcaccctgtggcctgggctgcctcacctcattcggtcccgcctagaaagaccagaggaccagaaaaccagaagcctgtcagagcgactagaggctggctccagccaacagccgcgcgcctcagcgtccacgagggttacctgggtaacgcgccgcttgggctcggcgcccagccgatgacgtaacccgcgcttgcgtagtggcgccgccctgatgtgtagtctccaggccgccccgaacaccagcccagcgggtcctggacccctaggtcatgtggctacagtggaatccaggcttggccgaatccaggacgaccaggccagacccaccggcagtaccttgcccgcccgctttagtcacttgctctaggtggatctaaacctctaggcctgggcgcggtggctcacgcttgtaatcccggcactttaggagggcaaggcggcagaatcgcttgagcccccggcagcatggagaggtggcagaggcagggccataccatcatcttgggtgcacctattatgggaggctggagtgcaatggtgccatcttggctcactgcaacctccgccccccaggttcaagcgattctgcctcagcctcctgagtaactgggatcataggcgcacgctaccacgcccggctaatttttctatttttagtagacatggggtttcgccacccccggcagcatgggtagacatggccctcccgcctgatctcttaaaaaaactttaaataattcgtggggggggttaccgcccacctgttttcccagctactccggaggctgcggtggaaggatcacctgagcccaggaggtcaagactgcagtgagctatgatcctgccactgcactccagcctgggcgacagcgtgagatcctgtctccaaaataaataaaattatgtacatatgtatgtatatttaattacatatattttgtataatttgtatatagtttataatatatacatgtatgtgtacacatacataaatatatgcgtaaatatatatatgcatatatatatgtaataaaatattaagaacccgcccagccgaagccacgggcgctttgggccctcggttggcctcagccacttcagtcgcggccccggggatgttgggggaaccctgtcaggcagcaagcgcgtcctccagccccgggcggccggcggctgtgcacccgccctccctccctcccacggcgctcgcctgcatgcgttttggcaaatatctaaacccgcaaaaccatcactagctctggtttcccaagatccttgaagcccctccgttcagcattccacgcccctctctgccctgctttcaaaccaccgccaatctgctttctgttatatatacagattagtttggattttctaacagttgtatataaatgcagtgacacatttgagtgtactcttttgtgatctggtttattttactcagcataattattttgagattatccattttgttgcatatgtaagtagctcattccttctattgctgagtggtgttccatctcatggatgcaccaccattgtttatcacgcatctgtccgtggacatgtaaactgttttctatttgcggctgttaaaaataaacttctgtgaacattcgtgtacaagtcttcctaaggacacgcatttcctttcctgttggataaatgcctaggcgtagaatggctggatcatataggaaatgaaaattcaactttttttttttgagatggagtctcactctgtcgcccggactggagtggagtggcgcgatctcggctcactgcaaactccgcctccgcggttcacaccattctcctgcctcggcctcccgagtagctgggactacaggcgcccaccaccacaccaagctaattttttcattttagtagagacggggtttcaccgtgttagccaggatggtctcaatctcctgacctcgtgatccacccgcctcagccttccgaagtgctggattacaggcgtgagccaccatgccccacgaaagttcaacattttaagaaactctccatttgttttccaaagtgtttgtaccgtttcacattcccaccagcaatacacagatgctcctgaactacgatagggttaggtccaaataagcccatggtaaactgaaaataccatgaatcaaatgatttacaatacccaaataaatccgtcaagttgaggagagtactgaatttgtatagcttgtataccatcataattttgaaaaatcataagttgaatcatggacaaggactgtataagagttgtaattcctccatatccttggcaacatgatatggtttattttttgcaattctaataggtgtgtattgggtattgcactgtagttttgatttccctaattactaacattaaacatcttttcatatacttcctttccatttgcatattttgtggtgaactgtgttcaaatgctttgcttggctttaaaaaaaaagtagctgaaattgcttgttttcttattgttgaattttatcttttattctttttttttttttttttttttttttttgagatggagtcttgctctgtcacccaggctggagtgcaatggcatgatcttggctcactgcaacctctgccacccaggttcaagtgattctcctgcctcagcctcccaagtagctgggattataggtgcacaccacgacacctggttaatttttgtattttgagtacagacagggtttcaccatgttggccaggctggtcttgaactcctgacctcaagtgatctgcccatctcagcctcccaaagtggtaggattacaggcgtgagccaccacgcccatcctttaactatcttttaatccacacagaagcccagagctcaaatcaggggccctgatatcttcaacaaggcctggctcgtgggtttatggcgcaggtctgaggagctcctggctccacgtttcccaccgatcccagtgtcctcgcctcacccagtctggggcattccgctcgggctttagcaggatgatgtaacatttggggcaaagatgccacccagcagccctgccatggaagccaggatggaaaagatctccacggccacagtggacttgccctgtgcgctgtggtacaggggcaggaaggttgtccagaagctgcagaacagcagcacgctgaaggtgaggaacttggacttgttgaaggcgtctggcagacccctggccaggaaggctacaaagaaggtgcccccagccaggaggcccaggtagcccagcacacaggagaaagcgacagcagagccctctcagcactggatgacaatgtggctgggctctgaggccatgtccccatctgggaatggtggggaagtgcccagccagatgccacagagaacaacctgcaccaaggaagcagcaaggaccaccgaggtggaagcgccaggtcccaggcacacccagaccctgtcacctggtgaccctgaaggccaggacggaagagacagccatggtgaacacaacagcaactgtggtctggtagaggcggcaggtggcagctgtgggacaaccaaggcaaggcaagggacagagggcacagagggtcagggaggtgagcggcgtgcagctgagagctctgttgttggccccgaccacaggtgtgtctcggtgcttcagaacagtctgaggaccagcactgccaggctggccagcatgagcgccaccaaggcgagcatgagtcccagggggtcgtcaaaggccaggaaggtctctgtcctgggcaggcagccatctctggtgcggcttgagtactgctcctctgggcacagaagacatctcttcgtacctgtgggagacacacatccctgcgtctgccacaggatcgtaatgacaccagccatgtgaaggaaggctccctatgcactaaaccagccttaccagcgtttcacacctattcattactgattgaagggggcctgcccctccacacctgtgggtatttctcgcaaggtggagacaagagactgagaaaagaaataagacacagagacaaagtgtagagaaagaaaagtgggcccaggggaccggcactcagcatacagaggacccacaccagcagcagtctgagttccctcagtatttattgatcactatctctaccatcttggcaagggggatgtggcaggactacacggtaatggtggggagagggtcagcaggaaaacatgtgagcaaaggactctgtgtcataaataagtttaaggaaaggtgctgtgcctgtgatgtaaccaagcaagttatagagaaacgccacactttgagactaattcaggagtcctttatcagccggtgaccgagagatggctagtgctcaaaattctctcagccccgaagaaggggctagattttcttttatactttggtttagaggagggggaacctagctgtagcaatcttacagaagtaaagcaggcaaaaaaaaaagttaaaaagacaaatggttacaggaaaacaaacagttccaggtacagaggctttaaatccatcacaaggtgataggtgcgggggctctgggtgctatctgccagacacaaacgcgggggctttagggtactattaccccagtgaattcctggcaactgcagacatagcctgccacagtaccttatcagttaattgcactctttgatatgctgagagtcagcttgctcaagttaagtccttgaggaagggagtgggtaaggagcccttgaggtcttgcaaatgaaggagctaaatggagtccatccagctttctcagctaagagagagtattcatattaaaacaaggtatggtatcacacctggatgtgcacgtaggccagatttatgtttgactttacccaaacacctcagtgcagtaaagagcagtactgccaccagcatgtctcacctccagccgtaagacagttttctcctatcccagtaaatggaatgtacaatcaggttttctaccgagacattccattcccagggatgaggagcaggagacagaggctttcctcttatctcaagtgcaaagaggccttcctctttcactaatcctcctcagcatagaccctttacaggtgtcaggctgggggacggtaaggtctttcccttcccacgaggccacatctcaggctgtctcaggggggcaaaccttggacaatacccaggctttctcaggcagaggtccctgcggccttccgcagtgcattgtgtccctgggtactcgagactggagaatggcgatgacttttaccaagcatactgcctgcaaacacatgtttaccaaggcacatcctgcacagccctaactccattaaaccttgagtcaatacagcacgtttctgtgagcacagggttggggctagggttacagattaacaacatctcaaggcagaagaatttttcttagtacagatcaaaatggagtttcttatgtcttcctttttctacatagacacagtaacagtctgatctctttctttcccccacagatttataattttgagataccagtgatgggatgggccacattagatcctgaggcacaaggaaaaatacacgccccgtatacatgtttgcatgtttttttaaaatggttaattttttccaagtagtaacaacaactgctctttttgttttgttgtttgagacagggtctcactcttgacacccaggctggaaagcagtggctcgatcacagctcactgcaacctccacctcccaggtaaagccatcttccccctcagcctcccaagtagctggaactacaggcatgcaccaccacacccagctattttttttattattgtttttgtaaagacaggggcctcaccctgttgcccaggctggtcttgaactcctggactcaagcaatccttccaccttggcctctcaaagtgctgggattacaggtctgagccaccacactcggctgcactcggacttttgaaccataaaaactgtgagataagaaatgtgctttgtttcatacgcttgtggtaatttgttaacagcagctatagaaactaatgcagggagcaactgggcattgcctacactcacagtgggagtgtgaactggaagcaccaccagtgtctgttaaagccacaggtatggcctggcatggtgcctcatgcctataatccctgcactttgggaagctgaggcaggaggattgcttgagctcaggagttcaagaacagcctgggaaacataatgagtccctgtctctataaaaataattttttaaaaaattagccaagcatggtggggtggcatgtacgtgtagtcccagctactcgggaggctgaggtaggaggatctcttgagcccagatcaaggctgcagtgaaccacgttcacaccactgcactccagcctgggcaacagagtgagacctcttctcaaataaaagaaaaaaaaaagctgcaggtatgtctacctgtggcccagcaatgccacacccaacagaaattcacctgtatgtccccaaaagacacaacaatgagacacggctcattgcagccgctgatcagcaggcttctcaaatcccccatccctgttggagtggatgaagcagccgtggtgcgtccgcacaatgggatctcaccagtcattagaacaagagatccacaaccacacataaccaccactaggatgaatctcacaaacaactgggaggaaaaagcaagacacaaaagaacactcactgtgtgattccacttataggacgtttaaaaatcaagcaaaacccactgacaccaatagaagtcagggcggtggatgggtcgcagggagaagacaatggctgggaggggtatgaaagcttctgggagggccaggttgtgccctgtttcttgatgagaggaccagggacacggaatgtttgccaggtgagaattcattgggctgcacgcttatgatctatgcatttgtctatatatttcaataaaacatttacctaataataatgacctttattcattctctttcagccactgttaataataagtgccgagaccagctcagtcggggagaccctaacctagcggtgctagaggaattaaagacacacacacagaaatacaggggtgtggagtgggaaatcagggatctcacagccttcagagctgagagcctccaacagagatttacccacatatttattgacagcaaaccagtgataagcattgtttctacagattatagattaactatgtgtttggcaaagtgtattcactgggcagatcctggaatactgacacactgaaaaatactacagaaaaaactcctgatggagactctgattcagcttgtgtgacactaatattttcattttgggtggtgagcaaatgtctttcctcactcagagaagggctcagtatccctaaacagcatagctgagttatgactggcctaatttagagctgcaccaacttcatgtaccaaatagggacaccgctggcctctgtgcttccctctgactcgaatacaccagaactgggatcatttctgcaccctggaaactgacctagaggtcctcctttgtcacatgcactgtcattctgtctcccagaggggctcacgggttgactatgcctatgtggacaaagtggaatcagccctcagtggtcttctgtccatagacaacatcaaattctgtaattaaatctccgttggcatcaaacatgatctctgtcccatcaggggtcttgaaatgcacgttcttgagaggacgaagcagctggggaaggatggatgacactgtagatgggcagggccagtcccagggcctgtgcaaaatgcatcaggtcctcagccaccgtggtgagcaggggctgcctcaggcagggccaacgtatccatgaggcacgggagacccagggctgtgatatttgcagggtcccatgaaaatgttctaatgttaactgcttgtaaaagcaaagaaaaaaattaaaaagtaattaatgggccatgcacggtggctcaagcctgtggtcccagcactttgggaggccgaggcaggcagatcacgaggtcaggagctcaagaccagcctgaccaatatggtgaaatgccgtccctaccaaaaatacaaaaattagccaggcgtggtggctcacgcctgtaatcccagccactcaggaagctgaggcagaagagtcacttgaacccgggagacggaggttgcagtgagccaagatcatgccactacgctccagcctgggcgacagagcaagactctgtctcaaaaaaaagtaataatgaacatataataatgagtccaacccaggatatattcatctttagaccaaggcaatggtaaaattgaattaagaatttttttttccacggaggaaggaacgcacaaaagccacagtgtggcccctgctccagggattccgtctgagcaaacacttcctccttggccttcccatcacactccaagtggagtaaaatcctggcgggacctacacaggtcagtccctgaacacctagacatcctgatccctcagtcacaaacctagcatggacttaagacccctcatcctggccaggcatggtagcttatgcctgtgatcccaacacttaccccaaagtggacagatcgcttgagcccagaagtttgagaccagcctgggcatcatggtgaaaatacaaaaattagctgggcgtggtggtgcatgcttgtagtcccagctactcgggaggctgaaggatcgcttgagcccaggaggttgagactgcagtgagctgtgaatgcatcactgtattccagcttgaacaacaaagcaaggcactgtcttaacacaaaacaaaacaaaaaattcctcagcccggcacggtggctcatgcctgtaatcctagcactttgggaggccaaggtgggcaaatcatctgaggtcaggaattcaaaaccagcctgaccaacatggtgaaaccccatctctactaaaaatacaaaattagccaggcgtgatggcacatgcctataatcccagctactcagaaggctgaggcagaagaattgcttgaacccaggaggcagaggttgcagttagctgagatcacaccattgcactccagcctggacagagcgaaactccgtctcaaaaaaaaaaaaatcttcgtccagtgctcctgctaagatgtggcttagggctgtgaatacaagatatcctcactgaggagcactgcccctgtcctccccaccaggagaccaagtgagtttcctgctgtctccccttccctgaatcatctactccacagtttgtttttgagacaaggtcttactctgttgcccaggctggagtgcagtggcaccatcatggcttgctgtagcttcaacctcctgggctcaagcgatcctcacacctgagccttccaagtagttgtgactagaggcgtgcaccatcacgacttttttttttttaaagatagtctcgctctgtcacccaggctggagtgcagtggtgtaatctcggctcactgcaagctctgccctcccaggttgaaggaattctcctacctcagcctcctgagtagctgggactacaggcgcccaccatcacgcctggctaattttttgtatttttagcagagatggggtttcactgtgttagccaggatggtctcgagatctcctgacctcgtaatccacctgcctctgcctcccaaaatgtgggggttacaggcgtgagccactgtgcccagcccatgcttggctgatttaaaaatttttttgtagattcagtgtcttactgtgtttccctggctgatcttgaactcctgggctcgaatgatcctcccacattggtctcccaaagtactgggactacaggcgtgagccaccatgctcagccccactccacacgttcgcctctcaccagccagggctggaagtcccaggcatcggcacacccctggtccccatgcttgcagcctgccagggcctgggcgatggcatagaccactgtgtaggcgatgtgtactttgctttccttctggaaagggtagtgctcaaccctcagactctcatttcctgagcagaactggactcctgcagccgctgtgcttttccctgctggcccccagctgctatggggctatgtgcacttgaaggtgacctcccagaatctccatatgaacatgtcttctggggtcctggcaaggcgcagggaagtcggggggctggctgttgcaaagcaggaggctgaatgagccctgcagaacccagaaggcactggcacagtcaggaccagcgccatgtgcagagtgtcccagctgacacagacctggcccaggatgcctcggcctgccaggcactgcaggatgagtctgaagtgctagctgttaaggaaaaccaggatgatggtggccgtacagttctccatcagccagatgatgtttttcatcttcagggactcccgggtggggatgcagagttggaattcaatgcagaccccagcctggcccagctcctggacgaccagagacctgccctgcagctcaaagtcgtccccctgcgccaggacgctcacccaagaccatcggaagtgaagcatcagctgcaccactgcatgggtggtcgtgaggtgactgagcagggtctgaaagaaggatgggaactgggtcctgtcgctgaggctggccagtgtggaggaggggctgacctgtgcaggaagaggccagggcaatggggaggggtgaggagcagctcaggcacctgctgaccaccaggttcaaaagaaagccaggttgacccacacgtccctggtggccctgggtgtgtcccccaattttgtcactgaaagctcacacctataatcacagcactgagaggccaaggcgggcagatcacttgaggtcaggagttcaagaccagcctggccaacaacatagtgaaaccccatctctactaaaaatacaaaaattagccaggcatgatggtgggtgcctgtaatcccagctacttggtaggctgaggcaggagaatcgcttgaaccctggaggccgaggttgcagcgagccgaaatcgcaccactgcaccctagcctgggtgacagaatgagactccgtctcaaaaaaaaaaaaaaattcccacataagtctgggcatggtggctcacgtacatcccagggctttgggaggccaaggtgggaggactgctagagcccaggaggtcgagactagcttgggcaacacagtatgaccccctactctaaagagacacacacagaaagagagacacacacacagagagagagagagagagacagacacagagacacacagaggaagagacagacagagacagacagagacagagacagagagacagagtcagacagagaaacaggagggaaggcaggcaggaagggaagaagggagggagggagggagaggagggagggagggagggagggatggaggaggggagagagagcgagccaagcaggcacagaaaaaaaaaaaaaggagaaaaggaaaggaagaaagaaaaaggccagatgtggtggctcacacctgtaatcccagcaccttgggaggcagaagtgggcagatcacttgaggccaggctggtctcaaactcctgacctcacgtgatcggcctgcctcagcctcccagagtgctgggattacagttgtaagccgcagcacccagccccaaggaataattgaacttaatgttcattcctctcgttttgcccacttcaaacttacgtttctgctcctttgccaagctgggtttttgtttgttttttttgagacagggttttactgtcacccaggctagagtgcagtggcaggaacacagctcactacatcctccacctactgggctcaagagatcttcctgcctcaggggactacagatgtgcaccacccaccacccccagttaaaaaaaattattttgtagagatggggtctatgtttcccagcctggtcttaaaattcctgggctcacgtgatcctcctgcctcagcaggcctggggatccgattctagttccggtttgcacagcgccgacaactctggggctacaggctggagccaccgtgcggggcctgggattcggactctagttccggtttccacagcgtggacaactctggggttacaggctggagccaccatgccgggcctggggttcggattctagttacggttcacacagcgcggacggacagttcttcactggcagtggcaatgactcggaacctacttgtgttgtttggccacgctgtgatctttgtcagtttttgcctgcttgtcgatttgccaatgaagagactactcttcgtgccccggaagataaagttctatgaaatcggggtcaacgaggttttgtgtctgtgtttgcttctgacctgtggctgaggcacaggatgaaactgctcggtctctggggtctgttggatcagagactttaacacgctcctcgtgtgggtgcaaaacattctcctaccgccagagggtagtaaggaaataggctatgcaaaggttatggggtctgaacggaacggtgctctggtctgattggtttacacagacccataaggctgacgcaacaggtagagctaacagatttgaaaataaaaaaacaggatacccaattaagtttaaatttcagataaattcatctaatattttagcataagtatgtcttgtatgtcctgtgcaatatttgggaccaaattctactaaaaaggactattcattgtttatctgaaaaccaaatttcactgggggtactgttttatctggcaaccctacaggtacaggaaaacagcttcttgagctgcagtcaagaaatgcagttgcagctgcacgcagtggctcatgcctgtaaacccaacactgggaggctgaggtggatcacaagcccaggagttgcaggccagcctgggcaacacagggagagttttgttttgttttgttttgttttgttttaaaaaaggccaggcgcagtgtctcacgcctgtaattccagcactttgggaggctgaggcgggtggatcacctgaggtcaggagtttgagaccagactgggcaacatagtgaaaccccatctctactaaaaatacaaaaattagccggtcatggcggcgggcacctgtggtcccagctacttgggaggctgagacaggagaattgcttgaacccagggggcagaggttgcagtgagccgagatcgcaccaccgcactccagcctgggcgacaagagtcagacttcgtctcaaaaaaattcaaaaaggaaaaaaaaaattgagtctctaatcctttaaatgtgcttgaattaaaaggaaagaaaagaaagtctacatatagaaacttctagttcagaagcattttatgtaagaatccaagtgggaagtaatcaaggtgaattcttggaaaaaaatcagcctggcttgatactttggggttaaaagcacctagaatagctatgcggttatttgcagaggttctatagaaatcaactctcctttttatcaggataggactggactaaattgatcgtacgatcaagcccatacctgaagtgtcacacctcagaataaactccccaatacatgacaacccaccctgaaggagtaaggggtgaaggggtgagctttctttgtggccccaacattcacaccgccccaggaaaacccttccaacctgttctgtgatttacagggccccctgcttcacaggtaggaaggcaggcctctcccccagcaggccagcaaactttgcaaatttaaggcgttcaagggcagaggaatcctgtaaacccaaatttacaggtttctcagtggaacatgaatctattaaattggactcgtcatacaatgctggtgggaatgtaaaatggtgcgctgctttggaaaacactccagcagctcctcagatagttaatcatagcatgaacatttggcccagaaattctacccatacaaccaagagaattgaaaacacactgaacatacacacaaaaacggatacataaatgttcatagcagccctattcacagtaggcccaaaatggaaacagttcaaatatacatcaactaataaatggatacacacgacatgctctattcatacaacggatttttaagacagggtcttgcactgttgcccaagctggattatagtggtacgattatagctcactgcacccttgacccaccccccccgccccccgactcaagtgattctcctgcctcagccttctgagtacccaggactacagctgcatgccactaatttttttttttttttcctgtagaaatggagtctccctatgttgcccaggctggtcttgacctcttgacatcaagcaatcctcccaccttggcctcccacagggccactatacccagcctatgatggaaaattaatcaatagaagggaacgacgctctgacacaggctgcaacgtggatgaaccttgaaaatatatttagtgagaaaagccagtcacaaaggaccacacagcgtatgattccgtttataggaagtatccagaaaaagcaaatctgtacagacaaaacatacattagtggttgccggcaggtggagctgatggaaactgctggctaaaggggttggggtttccttgtggggtgatgaaaatgttctcaaattggctgtggggatggctacacaactcgaacataccaaaagccatgagtgagttacgcggtatgtggattatatctcaggccggaggactgcttgagcctagcaaatcgaggctgcagtgagccgtgatcatgccactgcactccagcctgagcgacagagaccccatcactaaaaaaattaaaatgccccagcacagtggctcacacctgtgatcccagcacttcgtggggccgaggtgggcagatcacctaaggacagaagttccagaccatcctggccaacgtggggaaacaccgtctctactaaaaatacaaaaattagccgggaggtggtagggggcgcctggaaacccagctactcgggaggctgaggcaggagaatcgcttgaacccgggaggcggagattgcagtgagctgagatcgtgccactgcactccaccctgggaaacagcaagactccatctcaatacacccacatacatacataaaataaacagaaaaaaaaagttgcctctagacatagctactattatgggaatgacacccgagggcctgagagtcaggaggccccagcggggcggggccgtgtggaggctggcggcacaagccctatggcctggactcaaaacccagcttcagcgccccagtgctgggtgagctgcaacgtgtcactgctagttccctcaatctcagtgtcctggtgaatgcagcagcgatcaccattctcttacagagaggtcatggtgagggggaggatggcgtcaggctgtagggcattggcggggagccaggaccctccgtggtagggcctcagcgtcacccccattgtggccaataccacagcaaatattaggggagggtacggctctgagtacttacctggagaaacctgtagagtcccaggagcctggccattggcatagacaacgccaagcatgtttctccaaagcagctccgagagcgctgggcccagacgtgtagctggggatgggctcctcctgcccggtgagaaagctcatggtctcatggagtgctgcgtgcacgaagtccccctgtgtccagaattggttccttccagtgggttcttggtgtagctgacttcaacaatgaagctgcggaccctcacggcgagtgttactacagttcttatctggagttgttcattcctcccgttggattcgtggtcttgctggcttcagaagtgaagccacagaccttcgcagttagtataacagctcataaaggtagtatagacccacagaaagagcatcagcaggatttatcgcaaacagcaaaacaacaaacttccacaaactggaaggaaagcccaacagactgccaccgccggctcgggtggcctgcttttattcccttatctggccccacccacatcctgctgattggtccattttacagagcactgattggtccgttttacagagagctgattggtccgttttgattgagtgctgattggtgcgtttacaaacctttagctagacacagagtgctgattggtgcacttacaatcctttagctagacagaaaagttctccaagtcaccaccctacctggaagcccaaccggtttcacctctcacccagagttccggatggagaagcccagcctgaggctggggagcaggtgggcgtccctgttgatctcctccatggcaaatgtgaatccttgggcttcccagtagccccaggtggaaacgctgagggaaggagaagcccaggcttaccgcatgctgtagctgcagaggctatggcttatgcacactcaaaggggatgaggccacaagtctccacaagcgcttgtgcacgatgtagcctatacatcagacttgacataactacatcttagcaaaagactccattttatatttcataggacactctgccatcaaggataggatgttctgtttattaaacaacaaaaaaaaaagactgcacctaaccaggtaaggacacaagcacactcttccactgccagttctcaccaggggactactaggtgactataaaagattaggccttctcgggcacggtggctcatgcctgtaatcccagcactttgggaggtcaaggcaggaggatcacttgaggtcaggagttcaaaatcagcctggccaatgtagtgaaaccccatctctaataaaaatacaaaaaaattagccgggcatggtggtgtgcacctgtaatcccagctactcgggaggctgaggcaggagaatcacaagaacccgggaggcagaggttgcagtgagccgagatcgtgccattgcacaccagcccgggtgacagagcaaaactcttgtcttaaaaaataataataaaagaaaaagaaaattaggccttcaggagctcaaaatggctgttttaactgacactgttttgcagtcactcatgataactcagcctctgtggccaaaggctctgccacctcaaagacttccttgcaggatggcagaccaccgacctcacagaccacccacccaccgcctggcccagaccaggatgccttttgtcttcttcgctgcctctgaactggttccttaactctttctcctatctcttttttctcttgatgttaaatgtcactttgttggttgtggaatgtttaacctataacatttctatattaagtatactattatgtatggtttgcaatattaactgcttgtggagtggcttgagcctccgtgcctgtggctctgactaccaagtgaatgagaagcacaagggataattggctccttgggaactccatgtagctcatggcttttgtgattgaaataacatcagtaggccgggtgcggtggctcacgcctgtaatcccagcactttaggaggccaagacgggcggatcacctgaggtcaggagttcgagacaagcctggccaacatggtgaaaccccgtctctactaaaaattcaaaaattagctgagcatggtggagggtacctgtaatcccagctactcagaaggctgaggcaagagaatcgcttgaacctgggaggtggaggttgcagtgagcaaagatcacaccatcgcactccagcctgggggcaagagcgagactttgtctcaaaaaaaggaaaagaaaagaaaagaaataacatcagtaaacacttgacattgcggaaagacacgaacgtgtggacctggttatctctgaccttgcactgatcatgacatgtgcatagcaaaatgggcagaacagccaaaaaggggtggggggcggggggtaggacatgttggtcaaagggctccaagtttcagttagacaaggaggaataggtttccagatctattgcacagcatggaaactgtagttatcaataattaatgtatatttcaaaactgcaaaaagatcatatcttaaatgttcacattgcaaaaaatgataaggatgtgaggatatggatatgttgattagcccaatttaatcattccataatgtatacatatatcaagacatcatattgtaccccataaatatatacaattattattcattgattagaaaaaataacctggcaacatcaagtgatggcaagtggagtgattggaagtcttgtgtatgtctggtgagaatgcagaatgaaatggttgctttggaaaacattgtggcaatgtttaaataaaggtaaacaggccagccatggtggctctagcctgtagtcccagcactttgggaggctgaggcgggaggattgtttgaacccaggagttagaaaccagcctaggtcacaacgtgagactctgtctctatagaaaatgaaaagtaaataaaaaattaaaaaattagccgagtctggtctcatgcatctgtggtgccagctactcagaagctgaggtgggaggatcacttgagctgggaggtcaaggctgtagtgagctatgattgagccactgcactccagcctgggcagcagagccagaccctgtctccaaaaataaaataaagtaaaatgataaacatattcattttttaaaaaagaaaaaaatcaccggagggactatgtgaagaactgtccgcagagacagtttgggaacctgggacagaaatgggtgatggcacacacaggtaaagagaaattccctgggctgatcaactcatgaagagatttgttcattccacaaacacttgttcattcaacaaacacacttacctgtgcctggcgctgctctaagcgccaagggttggcggtggacaagagaggggagaatctctgcctcacctgtgcagtcgctgcagcacaatgaggagacaagcaacccatgcttcagacacagacagaaagcaagaaggaaaaacggagtgaggtgctaaggcagggccggtgagacaggctgaccagcatccagacagacaggatgagtcccggccatccaggagggattctgagaatcagctgctgcctgaggctttagaaggacactcctgaaggtgcccagccttcaggggctctccaccaaacaccctggtagctgcttaccttgaagactccaagccagctggtggagcagtgaaatcaaacagggtgatgttgtacaggtggaagatggagaagctggccctgaccaccacatcccctggacagtcaaagcgggggctcttccctggcaaccgccagcctattgggccagaaacagcagccccagagagagatcccacaagggcgggaagcagagagcacagcaacatgtctgtggtgtgctgacagccagcaacggcagcccccgtgtgggctgcttccaacagtgatggggggctttcatctgggagctcacccctcaatccaggacctgggggctggggacacagatggagctccaggcatccaggccctgggagaacagtggccactcagtcccagggccattaaaacttgtacttcctcctcctgtggtttctttgtctctgcccaggccaggggtaacagcccccaggcctcatctgcagacttcagagagggaggttgatgagtcctgactgtgtcctcagggactctgcaaacccaggagcagctgcacttagggtccccaggtcactggttttggagaggcccaaggagggtacaagaggcgaagactctcctgagccctcctgcctcagttggcagtgtttggagatagggacatccccagagcttcagtggccctgggttaacacctcctgcctgggggctcccagagggtcccaggcaagggtaaagcatgttcagcccccagagggctggcccaggctaagctggtgcgtttctgtggtcaggaagtccagttccaggcggagggtggagggtaggctgcaaagtgactccctaacatagtgcttacaaccccaggagatgcggctgtgaggcaggaaaatagagggaattggaggttaaataaagggcaaactgagtaaaagcagaagcaaggtgaagggacaggtaagcaaaaagcaaaatatgggcaggtgcagtggctcatgccataatcccagcatattgggaggcgggggcaggcagatcacccgaggtcaggagttcaagaccagcctggccaacatggtgaaacctcatctctactaaaaatacaaaaattagccaggcatagtagcacacgcctgtagtcccagctactcaggaggctgaggcaggaaaatgacttgaagctgggaggtggaggttgctgtgagccgagatcaccccactgcactctagcctgggcaacacagcaagactccatctcagaaaaaaaaaaaaaaaaaaaattccagaccttatcactttggagaaaataccacactaaaaagtgaactgaggaggctgggcgtggtggctaacgcctgtaatcccagcgctctgagaggccgaggcgggcggatcacgaggtcaagagatcgagaccatcctggccagcatggtgaaatcccatctctactaaaaatacaaaaattagctgggcgtggtggcacatgcctgtagtcccagctacttgggaggttgaggcaggagaattgcttgaacctgggaggcagaggttgcagtgagccaaggtcgtgccactgtactctagcctgggtgacagagcaagacttagtctccaaaacaaacaaacaaacaaacaaaacaacaacaacaacaacaaaaaacctcaccacgttcttgatttgtgtgtccctgatcactaactagtcagatgggacttttcttcacattggttagccccatgtatgtaagagggtagtatctttctaagcttggggtaggcttggtgagctttttttttccttttttatcttttttcttttcagagatgaggtctcactctgtcgcccaggctggcaaactcctgggatcaagcaatcctcccacctcagcctcccaagtagctgggactacaggcatgtgccaccatgccaggctaatgtttaaattttttgtagagatggggcccagttccatctggagttgatttttgagtgtaagggggtgacattcggtcttccttagaaaggttcaaagaggggtccttcaaactgggattctaggtcttctcccatagcttcaactcaaacagttctgcatttttttttagacatgaggtctcactctgtcacccaggctggagtgcagtggcaatgcatcatagctcactgcagccttgaactcctgagctcaagtcatcctcctgactcagcctcccgaggagctgagactacagaaatagccaccatgcctggctgatttttctatttttttgtagagacggggtttcgccatgttgcccaggctggtctcaaactcccgggtttaagggatcctcccaccttggccccacaaaatgctgggattacaggtgtgagccattgcacctggccaaaataacatttttattgagatataattcacacagcataaaattcacccttcttttttttttttttttttttttgaaatggagtctcactctgtcgcccagtctggagtgcaatggcacaatctccacccactcacccactgcaacctctgcctcccaggttcaagcaatttgcttgcctcagcctccagagtagctgggattacaggtacccaccaccatgctcagctaattttttaaattttttggtaaagacggggtttcactatgttggccaggctggtcttgaactcctgacctcaagtgatctgcccacctcagcctcccaaagtgcttggattacagacgtgagtgactgtacccagccgaaccttttacagttcagtagtttttggtacattctccagattgtgcgatcatcactggaatctaattccagcatcttttcatcgcccccaaaagaattccccttgccccttcttctagcccctggcacccataacagttctgcttttagctgatttacttttaattgggatttcgagtaagatttaatttgggacaaagatttctactgcttaaaaaaattttggtccgggtacggtggctcatgcctgtaatcccagcactttaggaggccgaggcaggtggatcacctgaggtcaggagttcaagaccagcctggccaacatggtaaaaccccgtctctactaaaaatacaaaaaaattagctgaatgtggtggtgggcacctgtaatctcagctactctggaggcttaggcaggagaatcacttgaacccgagaggtggaggttgcagtgagccaagatcacgcctttgcactccagcctgggcaacaagagcaagactctttttaaaaaaaacaaaacaaacaaacaaaaaaaaactgaaacctctgctagacaccaggctgcctcccaatggatctagagttaccaggtggcctatgatggtgtctagatccagactctagagacagactaagtcagtgttctctcaagggagatttcccaaatgggtggcagttataaatgcacacatgagccttcactgccccaaagggccacgccaatttcagctaccaagaaaatgaaccatgtcattacaagtgcctaattttcaagaaggagaataataagcccttagcaccctaatttggttttcccatagtggtttctgcacaaagtggcattcacacacaacattccagggaccagccgccagcagcaaagatgcggagacacggctctgattatccagctgaggcagcccctcccctccctgccactcctgggactcttaatctccaggcctcgttttattttattctaggtatttatatttccatgaagcatctgctttgtttactggtgtttgccccatgaacatgggcttccaagggactaaagccctatcagtccctctcactgatgtgctcccaccccagtgtccagaacagtgcctggtacacataggccctcaataaacagctgtccagcagatgctggaccccctggaggtgggtcctcctctcttttcttagctcacactctcctgcttcttcttcagcaatgagcagcttcagctatcctgagctcagtcccagagctgaggaccctccttgcatcatgatctcacccccacctgatttcagatacaaaacgagtatctgtggaaccctactattctggcacatggttacattgtagacattaatattaaaacttatttatatgaaatgttcttatgtaaggtttcgttaaagtatatgaaatataggacacattgatactaattccttgtttttctttttctttctttctttttttttttttttttttttttttgagacagagtctcactctgttgcccaggcaaggctggagtgcgttggcaggtctcggctcactgcaacctcggcttccccagttccagcgattctcctacctcagcctcccgagtagctgggattacaggcacgcaccaccatgcctggctaatttttgtatttttagtagagacggggtttcaccatgttggccaggctggtctgaaacacccgacctcaggtgatccgcctgcctcggcctcccgagttctgggattacaggcgtgagctatcgcgcccggcctccttgtttttcttgagtttacatataactgaggtttcttttttctttcttttttttgggggtggggggacggagtctcgctctgtcacccacgctggaaaactggagtgcaatggagcaatctcggctcactgcaacctccgcctccccggttccagtgattctcctgtctcagcctcctgagaaactgggattacaggcatgcgccaccacgcccaggtaatttttgtatttttagtagagacgggggtttcaccatattggtcaggctggtctcgaactcatgacctcgtgatccgcctgccttggcctcccaaagtgctgggattacaggcgtgtcaccgcgcccggccgacgtcctgtatttttatttgctaagagtggcgatcctagtctgggacatacttgtactaaacatatttatattaaaaacaatgttttaacatactactcttggacactgtataaaacggttgcgtgtctggaatgccgtcgttttgccccgcggccccatcgtacatgcgcatccccgcagccgccaccgtctccactttccgcagcagcgtccctgacgctgcgcgacccgttgccaaggcgactggaaccgcggcccgaggtaactggagggcacggcgggggcggggcgctcatcccaggcggcttctgattggcctcggccgcctcgtgcgtcacagccccgcccctgcccgggagtcccgcagcggtgacttgtcaccgacgcccggcgtgatccagcggaccaatggcggccgcccgcggcgcgcagggtgcggggatggggtccgcccgcggcgttgggcgcgctcgccagcccaggggtcgccatgaccgagtggcccaggcccgagcgaagcccgcgcgcggtgagtccgccgcggcccatccgtccctccgcccgccagagcgtccatcgggacgcccacccgggagggtctcggcgccgcgtcggcgggagctggcccgggatcgcggtccaggggcgcgcgtcgggggaggcgggcccgggcccgggagggggcgggccgggccggggttccagagcccatcgggagtcctgaggtcgccgtaggggagggaaggggaaggctagaggccacgcggggcggggactgggggggctggggccgccccttccgcagggaccccgacccctgttggcatccgcctgtccgtttgaggccgaagcccctctacgtacccccattgcccgcccaaacaccgctcggccgcgtccaagttctcccttccacacctgatcagcatcccgggacctatctccctcctgaacagccgcccccggacccatctccctccctacccggccccttgggcccatcccccactggaacagcagcccccgacccgtctctctccctacaagctccccctccccgccccaggcccatctccctcctgaacagccgcccccgacccatcccccacccaatcaccccaccatcctccccccaaccagccgtccacagccgtcgtcgctgcccctcccctgtattcccagtgcgctgcccttgcacacttccccagctcgtttattatggaactcctccgtgtggcatcctaagctcccaacgccctccccactgtaagcccccttctcaaagccagaaccattcactgactggcgcagtgaacacgtcttctatgtcactaagcatccggcatcagcggcaaagcccttctgcccatccccgcaatagaatttggggctcgggctgcagatctcagtgcccatgccaggtgaacctggcccttccacaggcactgagccctccaagtgacactctctcacacacacacatccccaacattaatcagagacccctaccaaagtagacttctaggaccccagggccaccacagcattgcccatgggggggcccagatcctcctcaccagccatgtagacctcagtccccttcacatcatcccaggccctcttcatcttccagaaacagccacccatcagtccaggactctcatcagctcaggtacccccacattggcctaggtgttccacatcagcccccatatagaccccagacacacccatggacctctggtgccttctgctaagacctcctctttaccctcatccctgataaacttagcatctcctcccacagacctcagcccaggaccctggaggatgctgaggggctacagcccccctccctagagtctccagggtgagctgccatgagcacctgagagagtataaggtctgaggccccagggcaaagggatttcttgaacctgtggagcttcaaaataggcccttttttcttattcaaaactacatatataaaagtgtgaatacaacataagagagcatttttgcctgtggccttggcagggaagaccaagctggtagtttcccaatcagggtgcaggtggccgggtacgctgactcgaagatggctggctgggcacagtccccgtgagttgcctttctgccaccctgcacctctcctttctcctggattgtaaaaccagatgcacgagaactgcagagtgtatgaaaaatgcagcagaggatgaagagggaaaaatcccatggaatccctccttttcacttgtcataagcatttcccatatggtcaaaaatccttcctaaagatgtcttgttttgttttgtttttccatgttgatgaaggtcacatgggagcccgacaccatttggaggagattcagagaagtatgaacagcacaaagcacttggccgccccccatgggcgtcttcccaggactccctttctatgacactcacgcatcatcctgcatcccacgttccctgtgcctcatgtcatctgtacatcatgtgtctactccccgtggtcatgtcatagtgttgtgtactgggcacggttgaatactcccatcacatgatgggggaggtagttgatcccaccacgttcaactgttgggcacttttgtagtgaatcttggtgcctgaatctcgcatcttgcacgcagtctaccaagtgttcttgatatataaatggccacagtgctttccagaaaggtcgtgccaatttatattctcaccagcggatcagtccagagtacaattgttaaagacaaacaaacgaaacctccctgcttatttttatttttacaacttttaatgttttcttcagttatatgttcaccatagtcggcttggaaaatgtacaaaaggtaacttcttttttttcttttcttttttttttttttttttgagacagagtcttactctgtcgctcaggctggagtgcagtggcacagtctcagctcactgcaatctccgcctcctgggttcaagcatttctcctgtctcagcctcccgagtagctgggattacaggtgcgtgccaccacgcccaactcatttttggttatttattttttttgggatggaatctcacgctgtcactcaggctggagtacagtggtgcgatcttggcttactgcaacctctgtttcctgggttggagcaattctcctgcctcagcctcccacgtagctgggattagaggtgtgcaccaccacgccggctaatttttgtatttttagtagacggggtttcgccatgtcggtcaggctggtcttgaactgctgacttcaggtgatccacccacccgggcctcccaaagtgctgggattacaggtgtgagccacggcacccggccacaaaaggttattttaaaattactcttcccactttccctctcttttcagagtctccagtctcccttgccctcttcctggtctccacccccagcttggacctggtaggaaagtcaggaagacagcaaagataacaccatgggtagacctgctgctggtggtggtgtcatccattattatgtagcccacctggctgcttccatttaaatggaatttaaatttaaaattcagttcctatttcaggtgctcctagccacacgtaggtggttgcatgggtagagaatctttacatccctgtaggaacttcactgggcagtgctggccacaccacggggcaggcattcttgttcccgcagctcgtcagtcaatgtgtgttgaatgactaaatgagagggagatagacactaagtaaggggaaaagttgtgttcagaaagtcatggaggttatgaagacagtgccataaggatgatggccaggacatctgcgaggggaggagctggggtgggaaggggaggggctggggtgggatggcaggtgcaaaggtcctggggcagccagtggcttgaactcagtgcaaagtagcctgtgagaggcatgtggaagattaggtcagaaggtgggaagaggtcaggttggttccttggggtgctggaggtcagaacaaggaagtaaggagccgaggggcatcctgagtacagagggccaccatctgatgtgacccctctgtccctgcccctctctgcaggcccctgattgctgattctgtccgcctgccacaccggctctgtccggagccactgggactcgggatccagtccacacacacccctcagaggggcactgtggccagagaaatgcttccacggcccaaagcccctgcctcccccagacgcccccagaccccaaccccgagtgagcaggacgcagaccctgggccagcaagccccagggacaccgaagcccagcgtctgcgcttccggcagttccagtaccacgtggcgagcgggccgcacctcgcgctgggccagctctggacgctgtgccgccagtggctgaggcccgaggcgcgctccaaggagcagatgctggagctgctggtgctggagcagttcctgggcgcgctgcccagcaagatgcggacctgggtgcagtcacagggcccccgaagctgcagggaggccgccagcctggtggaggacctcacacagatgtgccagcaggaaggtgagaggcgcaggcttcctgccccgggccgggccagggggcctgacgtctccgaggaccgaactgccctccttcccgcccacatcgctcccacccctgcccggcccctcccgaccagcaaacctctcctgccccgcggctgtgtttttaattatttttacatataaatgtgctgcacgcctcatctgcctcgaatttctcactcagtcggtgattaaagatccctccatttcccatgcgtccatctgtcctgtggctttgtgtctgctgctcctcacggctgctctctgggaaggacgctgcctcgccacttcctcccagccacctgcagcgcctcctgcaacactcaggaatcctagagatccttaagccttcacagggcgcaggccccatcgctggctgatggtggggagagacgcttaggtctgcatcccgactctgggagctgggaaatttggggttgaaactgggctccctccctgtctcctctctcagctcccctctcccctgacagggctttgtccttctgcatctttgcccctgtgaccccacgtcgagattccatccacccagggcccagtcccatgagtggggctctttctttcctagtgacaaaagtgcagggattggacactgggaggccaaaagaggcagccacggatggtgagagcagtcgtggcactgtggcctcgggagggcttccccagcagggccccagcaaggagggtgccaggcagccacgctgcaggagcaaaggctgggagtgagaagggttgcatcagagctcacagaaaagaggggtggagcaagggagaggaacaggccctccctttgcaccctcccactacagcatttccgtagaccaacagtgataagcagtttgcagaacacagggtccagggtccccttactgccccagggcagccggtgccacacttaggaaagctgtgacagctgagctttccagaggctcaagggtagccctgtaagctgcaaggcagaagccagatgaattggccctttgaactctctgatcctggggtagagggcccaagagcactggcttctggcgctctgtggacctcacagccatcccagcccagagccacccttgctagttttaatgttccatggtcactctcaaaattcaacgtttttgagcaaagggctctctatctgtcttccatagcggtggtctgctttctacattccatattttgagcctatgaaacagtagagcaagtataatgaacagccctgcaccggccacccacccttatcaaagcccaacctaggaaatgctttgtaatctcagcactttgggaggccaaggcaggcggatcacaaggcaggagttcgagactagcctggccaacatggtgaaactccgtctctactaaaaatacaaaaattagccgggcgtggtggcgcgtgcctatattatatcccagctactcaggaagctgaggcaggagaatcgcttgaacccaggaggcggagcttgcagtgagccaagatcacgccactgcactgcagcctgggcgacagagcgagactccgtctcaaaaaaaaaaaaaaaaaaaaaaggaacaaccagtggaatcagctgaacccccatgcacgtctcctagtcctgttgtcccccgctctgcctgacaccccagaggtggccgtgatcttgaatttttctttttttaattaaaaaataaataggggggggtcttgctgtgttgcccaggctgctctcaaactcttgggctcaagcagtcctcctgcctcagcctcccaaagtgctgggattactggtgtgagccaccacgcctggcctggttcccacgtcttgacccttctgtcaatggtgtcctgaaccctgcttcagcagtcgtcctctgtgcactctgtgcacacagccccggggggcttggggagcagagggctcacagtgctcgggcctccctagttagtcagtgctgcagtgtgtgtcctcgtgggcttctggaggcgcacaggggtgtggagtatgagtgaagagggtacttgtcttcagcggccctcggtgtcaccacaggttcctgcccagcagccacatggagggacagaatgacagccctgcagccactcttgcctgcgcctcaggggtgctgcagggatgttcggggaaagtctgccctccccagaaggcctggagaattgggggctctgggaagaacaggcccctctcacgatccctttctcccgcacagttctggtatctctggactcggtcgaaccccaggactggagtttcggtgaggaggaagatgggaagagtccaaggtcccagaaagaaccatcgcaggtgagcccggggcccccagctccgtgctcctgcaccccagggcatgcgtgccgcttctgggacggcctcaaggatgccccatccaaggactgtgtgaggttgtccccagcgctcccaggaagcccggcctccaaactccccgcctgccccacagattccccaagcttcctggggctcagtgctgggcgagggcagtcagtgcagctgtgtgtttgctgtgtgcctctgggcctcaccccagcccctcctgtcctttcccagcctcgcagttaagacccatcctcctgtgtcacccgcaccagatgctgcgtgtgttgagaaagtcctgctgccccgatcatcttccctcagtgaacccaggattctgggcgggcccagaaggaaatgctgagggctcccctgcagctagacctgctgttgcgcaggcctcaaggcgacgggaggggcccggctcggttgggagccaagcggatctctgtgtggctggagagattaaaatcaggggtggggacacgcagacacatgagagaaatccaggggtaatgggtaaatcacaaaagaacaaaagtaagaactgctaagtgagtagcatgtgttcgtatgatcagggctactgagtttgaccactttctgcctctggatcttggtattggagccgccaagggaaacacagcacggtcgaacaatgaatggagcaaggttttgctcacagaccagagaccgggccagagcaccatctgcccatgtggctgtcaggccggggccagcaggtccctcctagaggggtcctgacctaacagtggggctgtctaggtgccacgtgaagcacacgcctgagcagaacaaaggggcacacattgggaaacagagacctccacacgaggcactacacccagcacaaactggggggaccccttatctcttggtaaggagatgttctaggcccaggacccactctcaggcagccaagtaacaggctgaaagactgcacatgtgtgtctcccactggcttagtccgttctgggtgctgtaacaaaatacggctgggtgtggtggctcatcccggtaatcccagcactttgagtgaggcctcacgggaggctgaggtgggaggaccacttggtcccaggagttcaagagcagcctgggcaacatggcaagaccccatgtcttaaaaaaaaatgagccaggtgtaggggtgtgcacctgtagtcttagcaactctggaggctgaggtaggaggatcacttgagcccaggagttcaaggctgtagtaagctatgatcatgtttctacactccagcctggatgacagagtgagaccctaactcaaaaaacatcaacagccgggcacagtggctcacgcatgtaatcccagcactttgggaggctgaggcaggcggatcacaagttcaggagttcaaggaagaaggaagtaacttgtggaatgctgagaaaggtaaaaacaccttcaaataaggaagaggaacaggctatgacctaatgcttgcttggaccagtataggcacaccagggcaaatatttaggctaaattgtgggagctaagaacataaagtacattgattttttttattatggctagcagatatataagaatgttagcacaggtctttgaataaattttgcttctaagagaagttactatttattcctaattagatggggaggaaagtctttgaagaggaacttctactttacttttttttttttttaatggagtcttgctctgtagcccaggctggagtgcagtggcgcgatctcggctcactgcaagctctgcctcccgggttcacgccattctcctgcctcagcctccggagtagctgggactacaggcgcccgccacctccccggctaattttttttgtatttttagtagagacggggtttcaccgtgttcaccaggatggtctcgatctcctgacctcgtgatccacccgcctcggcctcctgaagtgcgtgagccatcgcgcccggccctaaaatagatttaaagatcatcatgagagcccctctcctgcaccaaaacaaagtttcgtgggccgtggtttctgtttctgcatctaacggaggcatctaacctgggtagaccacagttgttggccacgggcttcctcagccgctgccggcagatgtgcttatctgactccctctcccatcccagacgccacgtggaaaccacagccgcgctcacaggccatcccctcaccacacggcaactccaaggactctctttttgcgggggtcgtaggtggggaaggctgctgaggtcctcccacccctctcccaccagggccgctgtggctgagaggatcctcgttggcgctggtttaggctgtggggctcagccacagcagggtgccccaacgtccctgagcgagctgcacttgtggagggagaggccttaggcctgaggcctggcgcccgcgtggagagacggcagctccgggatcggggcgctggtgagcgcggccccaggcattgccgctgccagggtgctaacactgcctgaggcacctctgcttttgaagtcgccggggattagcgggagcgtaggtgagggacaggtggagctgctctgcgcggggcagcccggctcgccaggaggcgctgtggagtgggcacgactggcgatcgctgagcgcatacaaccgcctaccatcggaagccttttgagaaatgcttccttaggcggtttcgtcaccgtgcatacatcgcagagggcactcacacacctacacgcacagcccatggctcctaggctacagacctgcacagcacggggctgcactgaatactgtgggcaacggtaacacaatgttgtttgtggatttaaacatagaaaaggtacagtaaaaatacaaaatagaagataaaaaacagtacacttgtataaagcacttgccaggaagggagcttgtgagactggaagttgctctgggtgagtctgagtggtgagtgaatgtgaaggcctgggaggttattgtgctgtggacttcataaacatggtgcacttaggctactaaattggcaactatatttccttcttcaatataatttatcttactgtaagtttttgctttacattttttttttctttcttagactgactctcactctgtcacccaggctggagtgcagtggcacgatcatggctcaccgcaacctcaaccttctgggctcatgcgatcttcctacctgagtcttctgagtagctgggaacacaggcacacattaccgcaccggctaatttttatatgttttaaaatttttttagtttttgtgtagatggggtttcactatgttgcccaggctggtctcaaactcctaggctcaagcgatcctccctcctcagccacccaaagtgctggaattacaggcgtgagccactgtgcctggcgtaaaaaactttctgactcttggggccgggcgcggtggctcacgcctgtaatcccagcactttgggaggccgcggcgggcggatcactagaggtcaggccttcgagaccagcgtggccaacatggtggaacctcgtctctactaaaaatacaaaaaaatagctgggcgtggtggtgtgcacctgtaagtccagctactccggaagctgaggcaggagaatcgcttggatccaggaggcggaggctgcagtgagccgagatcacgccattgcactccagcccgagcaacaggagcgaaactccgtctcaaaacaaaacaaaacaaaaaacaacctgtgtcattttaaaataaataaatgatacatcattatcccacagaaaggttatgctctgggggcagcagaaataaaagctttgttttaaagaagcggaagaaggattaaacctttttaaaaaccaaaaacatcgaagctgggcgcctcctgtccgaggccaaccgctgccgtcaaccgtccgcacggacggcgcctgaggagccaccgagacggcgaagagccgcggccgccgcggagaaggaggaggagccagcgcaggaggcccgagcggccgccacgcccggacacacggcgtccatcttaatgaggagctgccgcggctgggcgcccgccagcctcccgccgccgcctcgggtcaccgccccgcggggtagtccgggggatcctgctcatctcagcttgccagcaccctggggttgaggagctgcccgaaagtttcatttggctgctgcactcccacccaccctgcctacccgtgcttcagaggcgatcacctcagctgttggactctgaggcccgagtgccttcgcaccgtgtcgagagcgccatggacctccacctctgtgggttttgtggtcctggggcctcggtgccttcctgcccgcggctggcactcttcgcgccctgttggtgatgactcggtagtagagaagtccctcaagtccttgaaggacaagaacaagaagctggaggaaggcggccctgtgtacagcgcccccgcagagatggtggtgaagtcccgggggcagagagggtgctgggcgagctgaggcactactaccatggcttccgcctgctacggatccacaccaagatcgcagcacgcatgctctggcgcatcctcaactgccacaccctgacccgccaggcgcgcaggcagttgctccggttctgtgccgacctcttccgcctggtgccgttcctcctgttcgtggtggtgccgttcgtggagtttctgctgcctgttgctgtgaaactcttccccaacatgttgccatccacatccgagactcagtccatcaaggagaagaggctgaaggagcttcaggtcaagctggagctagccgagttcctccaggacaccatccaggagatggccttgaagaacgaggcagccaagggcagtgccaccaaagacttctctgtgtttttccagaagatccgggagacgggggagaggcccagcaatgaggaaatcatgggtttttccaaattatttgaggatgagctgacccttgacaacctgacacggccgcagctggtggccctgtgcaagctgctggagctacagcttcctgcgcttccagctcacgatgcggctgcgctccataaaggcagaggacaagctgtttgctgaggaaggggtggacagcctgaacgtcaaggagctgcaggcggcatgtcgggcacgaggcatgcgggccctgggcgtcagggaaaaccacctgaggggccagctgaagcagtggctggacctgcacctgcatcaggagatccccacatcgctgctcatcctgtcccggaccatgtagctcccggacaccctcttgccagccgaccagctcaagtccacactgcagactctcccagagattgtggcaaaggaagcacaggtgaaagtggccgaggtggagggcaagcaggtggacaaggccaagctagaggccacactgcaggagaaggcgaccatgcagtaggagcaccgcgagaaggagctgcagaagcattcggaggtggcgaaggatgttgaacccgaatgtgtggaaggcgctccccaaaggccaggggcccagccccagccagaagtgcctgacactgtcctgcagtcagagaccatgaaggacactgcccccgtgctagagggcttgaaggaggaagagatgactaaggaggagatcagcatcctcagcaatgcctgctctaagctgcaggaacagaagaagtcactcaccaggaagaaggaggagctggagctgctgaaggaggacatgcaggactacagcgaggacttgcaggagctcaagaaggaactttcaaagactggtgaagaaaaatacatggaaggatctaaagccagcaagagattgacaaaaagggtgcagcagataatcgggcagatcaacggcttgatctcgcagctggagatggaccagtgggccagcaagctggccccggccaagggcgtgcccatgggggagaacgtcatcagtgttgccgagctcatcaacgccatgaagcaagtcaagcacattcccaaaagcaagctcaccagcctggccgcagcactgaatgaaaataaggatggcaaggtcaacgtcgaccacctcatcaaggtgattgagctggtggacaaagaagatgttcacgtctccaccagtcaggtggccgagattgtagcaacactggaaaaagaggagaaagggtggagaaggagaaggtggagaaggaggttgcagaggtgaagagctagagccactggcgtgggcacctgtcctcctgctgcactgccaccctggtgagggctgtgagagcgatttgcggtgattcttagtggctcatctaatactttggctggaataaatcagagacttccataatcaagtaaactgtaattttcatcattccacggagcttcaatctgtctggagtcccagaatccctccacagaatcctgtctggatccacactgtggtgtggctgccacggcctcctggctccagaggcggctgggccaaggcaggaaggtgcccccctgtgtgtggcctcacgtctcagtgtctgactgtgctgccctgtgcccagggaggagaatgaggaccacatggactctgcccacacggagctggctgctacgcccaccctcagaggcgtcaggagacacagcctggccccctcagggctgaagatgcctccattcacctgtggaccttgctttctagatttcagcatcaatagacctgtcttcctgcatgcttttagttggatctgggtcactgtggagacagaggtatctgccatctctgtggcctctggagagtgacgtctccctgctggcagggccggttctcacctgcagttttccttgtgtatcggagctctttcttaactttctattttcccccaattctttaagcagtcgattggcacagagttttcccacgctggtcggcctgccccaagagccatctctgacccaagccacgcaactctgacgtagccctagccatgggactcccttgggtggtgcttgggctgcgcgccacgggggctgcagtggatttactgtgtcagggatgagcctggctcgggttggtggggctctgaagcacatttggggttctttgtagcttctaatgtgaggtttgagtccagtgcacccacagcagcatacccttctcaccccttgtggtgttgcaggctcaggcccctggggtcctttaacaagcaggctggtcaccgaggcacgaagacgaggcacagggcatcccctggggcttcaagggcaacacccgcagtgcttagggtttaccctgtgccctctgggtggggtggcctccctgcactcggcagcatggtcgggctggcgagggcgtgggcaggcagtgtcctgtggccacctccaccctcctgcccagccggctgtgtcacactcatatttttaaggtcaggttggttcctggtaaaaatgtccctccgggggcctccaagcataggatttggaagacataggaatggcacaggcagccaggaaagcagctgcgctcagacgatgccttctccattacttgaagcttctttttgttcagccattaaagaaacttgacaaaataggaacaggagatatttctcaattgtaaacctttgtgcagggacagttggcttccaaagcctttcagatttcaattatttgagaaagaagtttgttttagatccttaatatttatgaattctcaaaaaaaatcaatgtatagacattttatagctttaaccctgcaagtgtttcaagctgtgtttcttaattagtatactaactgccctggggcatgtaggtaagtgtaaatgatgtggtttgagccaagttttcatctgtaatcccactgcttgaggtggccaaggccggaggataagccaagcccaggagttggagaccaggctggacgatggagcgagaccatgttactttctttttcttttttctgagatggagtcttgctctgttgcccaggctggagtgccgtggcatgatctcggctcactgcaacctccacctcctgggttcaaatgattctcctgccccacagacaaacgccactatgcctggctaatttttgtacttttagtagagatggggtttcattatgttggccaggctggtctcgaattcctgacctcaagtgatctacctgccttggcctcccaaagtgccaggatgatggcgtgagccaccgaggccggccctttttacctttttttgagacggggtctcactctgtcacccagactggagtgcagtagcacagttatagctcactgcagccttgaccaccgaggctcaagtgatcctcccatctcagctagaattacaggcttgagccacagtgcctggtaattttctaattttgtagagttgggacttagctatgttgcctacactggtcttgaactcctgttctcaagcaattctccagcctcagccttagcctcccaaagtggtgggattctaggtgtgagccactgtgcctggcctttaaaattttcaatctccccaaagcctccaaaatattctttagttagttcttcagaagtagctgggctcaatccacccacgaaaacctttcggggggttctttcccttttcaagctttggctctttgcagcaggggtggggggtgatcctatcaatttgccatccagctcctgttctttccgttccaaggccttaagagcactagcagcgttttccaaaagcacagatacaaatccccttgatcttccagtaactgttttaactgtgcaatctgcaacttccctaagtcaagacacatcgtcagatctttttgcttgtaacactgtaccatcatccggcagatcttggatccctctgcgatttcctctgtattggttgtggtactcattcaggtctttgctggtggagaagttgtaggcggggggtgctggtgcacattcagggtcaggcagcagcttatgctacggagttggatttcaaatggtggtggaagagagtcattataattttacgagatcactgtggtgtgtgtggtccattgttgactgaaacaccattaccccatggggaggggctgcctgaagcctgtaagggtagctgcccgaagccctttgagggtagcactctaaggtccctgagatcccatgggcgtatctccctgaggccctggcgggaatgactgttggaacctcagtggtaagtgatgccagtgtcctctgtggaacacactgctggggtccctggtggttcccaccgcgtagctgatactcgtggcccctgcttttcttctttgtgcatagcgatctcctggcatctcaggtatgcattatctcaccggtgagctttttcttgtgggcattctcgggttttttcactttactccactgtgttgctgcagatcttcaatgggtccttgagcgttctgggctattctggcttgtgaatatctgtctgtagttgatttgtgtgtgggtagtgggagggggaaatgaaggttggtatctcctactccaccatcttggtgatgtcgctccactctttccttttttttttttccaaaataacccagcaccattgccccaactaaaaccattaagataattcctggccggacacggtggttcatgcctgtaatcccagcactttgggaggccgaggtgggtggatcactagaggtcaggagttcaggaccaggctggccagcatggtgaagcctcgtctctaccaaaaaatacaaaaattagctgggtgtggtggcacgtgcctatagtcccagctactcgggaggctgaggcataagaatcgcttgaacccagcgggtggaggttgcagtaagccaagattgcgccactgcactccagcctgggcgaaagagtgagaccctgtctctaaataaataaataaaatagagctattaagataattcctcaacaacagtaagttgccaggcattcatatttcctcctttattcttgtttcattttgttttgtttgagacggcgtctcgctctgtcgccaggctgcagtgcagtggtgcaatctcagctcactgcaacctccgcctcctgggttcaaacgattctcctgcctcagcctcccgagtagctgggactacaggtgcacgccaccacactcagctaatttttgtatttttagtagagatggggtttcaccatgttggcctagatggtctcgatatcctgacctcttcatcctcccgcttctgcctcccaaagtgctgggattacaggcgtgagccaccacgcctggccccttattcttgttttctttttcttggttgcttggtttgcatcaggactctcccagggtgtgacatgcatctccctcccgcctccaatctccccacctgtcatccctgaaacaataaacctgggtccacctctggaaggataagaacccagatctgtggccagtggctcaccggggctatggggatgtgtttgcatttgaaggtacagatagggccccgggaatgtcttggtttctgtgcctgacccaagtgtgtcgatagctcctctgatgccccctgagagtcaggggaactaagcatgcccctctctccacacatacatgccacccactcttctctccacgcagcccctctgctgcccttgattagtcacagacgccaaggtgggtgaagtagggaagagcctgactgtccacaatggcccccagtagccaggtaccaggaagaggcgtaaaagggagtcccgcctttactcctatagatggtggctcctctggttacgatttcagaattcaacatgttttacaatcaaaactagcatttgataagaaataaaaatcaataacccagccaaacacaccatccacatactcccaacgtgagagcaggaagaatcttgtgccttaactcccttcctgccatcagctccctccctccctccctccctcctccgtctctagcccagcaatccctctactccagttttgcccagctattgggaatcttggacagcttccttaggcccctgtgcatccaggtagggttggggcagcagaaagcgaagacccactcaagacagaccttgtcagtgcgtgcttgactcctggtcttttctgatgctttgtttgactcaacatacctcctccaacaacctgatttgcattgataagtgtcactgtgttttcctttgacacgactccgttgcagtttgccgagcccttgatggtaccaggctctgggcacgtagcacccacatcctcactggaaacccagagagctaaagctcctcatccagggccacacaacaagcagggctggagcctggacaccaagccaagcccctctgtttcgaattcttgctcttcaaccacagctcagtctcctcccaggaagtggtgatccccgctttgggcgggacacggttaggtgcatcagaggtcataggtcgcaggtgggatgtgaagtctgtgaagtcgcccacttcctctgggcttgtgggcaaggacagtgcagccttgggggacgggagttaggagccccagcttgtaacagtgacccgagctgtggcacaggtcccctggctccatctaatgctctgttgtcactgtcctgaaatgatcaacgatctttgaacaaggggatttgcatttccattttgtacaggggcccctcgaattctgtctcaggtcctgttaagagctctttaggagtggttatttattttttgtataagcagagtcttgctgtgttgcccaggctggtcccaaactcctggcctcaagcaatcctccagcatcagcatcccaaagcacgggaacaacaggcgcgacaccgcgcactgccctgggacagagcctttggggatgacgcccgttccttggttgttcggtggtggtggggaggatggctcctgaggggcagctgccgaacagtcctgtgcttgccattctaggcgtctgagctgattctggatgcagtggcagcagccccagcactccccgaggaaagtgagtggctggagactacccagctccagcagagtctgcacaccagggcggaggccgaagcgccccgcgcccctggcttgctgggtgagtctggctcctgtgtggattaagggttggaaatggagtttgggacttcaacccaaagccacagactttgttaatgggttgagttgggtgcttcggtggtgaactccacacttcccccagaaagcatgcacacctcctgtgaggactgagatctggggcccctagaaccaccatgtacatcgttcaccctacgagaagggcctcagcctccgcacctgaacggcagccaaggcagacagtctgagagtgttggagcacggggttacccagagggccagccaggtaggaacaagggccagtgctgtgggatctgctcccaaaacatgtgcctttttttttttttttcgagacagagtcttgctctgttgcccaggctggagtgcagtggtgtgatcttggctcattgcaacctccgcctcctgggttcaagcgattctcctgcctcaccctcctgagtagctgggattacaggcgcacaccaccacgcccagctaatttttgtattttagtagagacggggtttcaccatgttggtcaggctggtgtctaactcctcacctcatgatccaccttcctcggcctcccaaagtgctgggattacaggcatgagccactgcaccggccacatgtgcccttgtatcttaaaggacagaacggaggacacaggggccgtattgagcagaggaagggcctggacttggctcagtcactggggtcctccgtgcccctggggagcacagggagatgccaaggccatccactcactacaggtgacccatctccctcgccctccacagggtcccgggcccgcttgcctctgaagccgagtatctgggacgagcctgaggaccttctcgcagggccctcctcagacctgcgggcagaagggactgtgatctcgagccccaagggtccaagtgctcagagaatcagtccccgaaggagaaacaggaacactgaccagagcggccgccaccagccatccctcaagcacaccaaaggtggtacccaagaggctgttgcaggcatctcggtagtgccgcgtgggccccgaggtgggcggcccttccagtgtgccgactgtgggatggtcttcacctgggtcacccacttcatcgagcaccagaagacccatcgcgaggaagggccctttccgtgccccgagtgtggcaaggtcttcctgcacaactccgtcctcactgagcatggcaagatccacctgctggagccaccgaggaagaaagccccccggagcaagggcccccgggagtccgtcccacccagggatggagcccagggcccagtggcccctcgcagccccaaaagacccttccagtgtagcgtctgcgggaaggccttcccctggatggtccacctcattgaccaccagaagctccacacggcccacggccacatgtgaatggccagcctcgggcctcggccacccggccctgagtccctggggggagctgatgggccccagaagatgggggacatcccccagccccaccaacccctggccaccttgggactcctcttgaaggacacaagctgtttctcggaagaccctggacacctgctccgaagccaagcacgggatggggcttcccagggtctcagctgagaagcagcagttccacagcacagcctggtcagtcctgcgcactatagttttgcaagtggcttgaagaggagtttcattcgcgtcccatctttcagaagccttgtccaggtctccctgttagcacctgactcagcggcagcttctgccgctgggttttcatttcactgtggatatccctgaggccatgagggtgggagccggcctgggcagctccaactccagagaagggtacagctgaccccggctgccctcctgccagcttagcccccttggaacctaacagataaacagggttttgtttttttccttttttgggtaaagtacatgcaacataaaatttaccatttcagtcattaaaaatgaacagttcagtggcattaagcacattcacaacactgtgcaactaccagcactctctagctccaaagatgttttcgtcttgcccagaaagagagcccacagtcctcagcacgccttcgccattcctgcccgccctgacaaccagaatctgcttcctgtctctgaggatttcaggcgcagtctttaggcctgaccaaaactgacctgcctgtattttgtttgacttacagaaggattttttttttagatagatgccaacatttgtttaaaccataaaaatctggctttctggtctgccaggaaggatcagatggtctccaaagagtgggcccgcctctcctgctaggctggagcagagtgtgggcaggcggtgacgtcacagcggggagccagcctcggactcggcttctcacccgtccccaactcattgttgtcggacactcgtcccctttcaagcaaaagccttaaaagtttttgcctttttctttttctcctcccgacttcacttggaaacacagtgttgggctgactgtgaatccgcacaggcagagacatttttccaagtcgccttctaaatcaaaagcctttggacttacccacgtcacatccgcctgctgctgcttctcaaccaagctgcccccactctcggcctctgtccccgatggccctctcgggctgtgcaggtcccacggacccaccgctgccttcacttcatcctcgctgccgcgcttgccttctcacgcttgccttctcggagcgccccctaaccgcgcctccggaccttgcttcccggctccctcaggcatccccagcttttccctgcagtccccactgggggctcctggctctatcctatgccttaattgctggtgggctccagctcccctcctggcaccttctctctcatcctgcaaaggaggagcttcttctacagagctcaggatggagggtggggtcttggccccgcagtcagcccattactctcggaagcccccctgagccttctctcaggcgcagattgatcgtctcagacaacgggatgtgtagagatagctctcccgagtgcccccacttgttgggagccaggggctcattccatgctgtttccatctcggtctccacctgctggaggcacaatcacagctcagtttgttggtgccagagttgcacaagaaagtgggtgccattgaacacgaggcatcagtcaggctccagcctacctgggctggccccagagacatccatctggtgtccctcagttctccaattgagtttgtccaaataactcatcttcccttgtgcaaaaacaaaaaacaacaacaaagaaaacaacgcaaactgcctcccctctggggttcccactcccctcagagggaccaccaccttccaaggccccacaaggatttttgattgccctgggaacccagctcccaatccctctcagttctcttttctcctctgcaccatcagccccaggctctctccccatttcttgaatgcctgcagctgcctctaagcaaactctgcctccagcccgttccctctgccccatccccatcctgcagccaacagggtccctctaaaatgcagacactgaaaagacaaagcccagcagggtagctctatagtgtcctttgtggccctgctgcctccacagcccccagcactgggatggtggaggctggtgtccttaactcactgtgtctccacctgactccacactgcctctcaccctggcctcctcctgtgcctagaacagtctccactgccatacttgaccacacccagcatacaacaggtcctacagagtgaagggatgagtgactcaatgagtgaggggaagtccctgtggagacaccgggacaccattgtgggctgcagtttccagccggggaagcctccctcgacctctgaggggaggtgggccaccccttgagggccactctcaatgcgctccaccttggctgacggaagcaaggacgtggcccaggatcctggagggccactcctgtgtgcgccaccttggctgacagaagcaaggacgtggcccagggtcctggagggccactcttgtgtgctccaccttggctgacggaagcaaggacgtggcccaggatcctggagggccactcttgtgtgctccaccttggctgacagaagcaaggacgtggcccagggtcctggagggccactctcacgtgctacaccttggctgacagaagcaaggacttggcccagggtgctggaccagttgtggcagctgctgcaactcacgaaagccaccacgtggtgttcttcacctaacttgcccagtcccaagcccctgcccgagctgcagtgagacagagcactagcccctctcttctctttgggttcaccccagctgtggaagccccagcacctcagcacgcctcccttgccctgtgccttcctctgccagcaccccccaaagactccaacacccccatcacgatgtgccccagtctcctgtcctccagcccttgtcacaggagctgtgagcccagccctgggcacttcacgctctggaagaccggagtctcagacgccacctttctccctggcagccagggtctcttgggtcagaggaggcctggacactgccaggttttgaagctgtcaaaaagattttttttttaaagggagaaatatgtccagggagctgtaactgttacagtatattttaaatgtatgtgttgaacagattaactttttgaacattaacatacagcatgacacagttctgctatccatgctgtgattgcaggattgcttggaagctgtactgatgtgcagcccacctgctcatggtggggggtcctgttccaggccacagagaggcaaccagcaatgctctgcttggagattcgtacaggaagccaagaaggagctgagaggggcccagccagtggttacaagagacagcaggaggttcagaccacagcaagggtggcactggagtagcctccagctcatcttatttgactggtagagtgttattaaagcctttgaaatccctaccagcttttaaaaatcaagagatttcacatagaaatcctgatctctgggttctttagagaaatccagacctgggacgctgggcttgccagtccgcacgaccccacttggctggagccaagcagcacttgcccctgtagaaagagcccgcccctgcaaaagcatgtacggtttagaaacctggctgagaaaaacagaggatcagaaggtctgagggaggaaacagaggggcaagtttgagggagctgggcagggccgcctggccaccatcagggctgagcaggctcagtgtggcaccactgacagcttctcaccaggactatcagaccgcttgggaaaaagacttcaccatgagttgtgtgttcataccttttgatccagtaaaaggaaacggttgggggtgggggtggggggcaagagtatacattttgtgaaagaaaaaatacacaaaaagatgttttgtggcatttgggtttgtgagttcgagaactgaaaaacggcattttatgtataatggaaagcctctttactgctgtagagtgaaaagcaggctggctttcagtgcgacggtcacaaatgtggggctttacagtacttggaatgtacaggacgcccttaaaagccaagaagcttgcctttgctttgtttacatcagtgcattatgattttgagccattatatctcttcataattgccactgttttagggcttatgaaatttaaagtcttaacttgtgtgttaaccagccaaatctttgcaagtgtctgtgtgtggtacgagaattcgtattgtgttctctgctgttttcagagttgtttcagtcaaagaaaaaaaaatgcccgtcttaaaacttttcctctgcttcaaatacagctcccaagcccaggctgattggaattaatctgtcctcccttaaaagggcaaaagcacaaggctcagccctggctttcccagctcctctggtctcgctgctccacggacgtgtgacgtacgctggtgaaacgaagcccgcttgaatgggggcttcactattgtgtgctgctgaacctaggcctagcgcctggcaggctttggtgaatgttcagaaaatgacaattcatttcgtgtcagcgagggcacaccagctttgaatattttgctgctgttcaaatgcacaattttgacaattacctagcaatgtccaaagtcgtcataattgttagtgtcttgcacgtgatgttccttataaccatgtaataaatacagtgtgaagtctccatggctgcctcagtgtggaaaatgcaaagactcccgtgtgtgcgatcttggtgaatgttttggttgaaagtatgtgttttgaaaaaatcattgctttgtttgcagcagtaaaactgacggtagagtttccaacacgaaagcccgtgtggtcgcgccgggagctcacggcgttccaagcggcacttatcccgcgttgatgcccaggcaccccgcgcgccctgtttcaccaggcccagtcactccagctccagcagcactgagagctcacgaacgccaagggcgagagcgaggtgggggagggcggccggaaatgcgcgcgcggctctctgggaaatggagttaggctcgcgccggcgcagtgtcggctgccggtgccgcggcctttgtctcgcagtcaggagggtgagctaggccggcgaggagggggaggggaggccaggccgggccgggccgggccgggtgcggggggtccggggatcttcctgaggccctggcggggcgagtttccagcagcgcgcgtctgtgtggagtccgttttgctgcccggggcctggggaaggccgtttcggggctggcgggggcaggctttgcggggcatccctagtctgagaggagggcggggcccaacgcccagctggacaggagctgctccgacggcccctgagggaacgcgcgccccgcccctggccccacctctgccccacaccgggcactgggccgccacctttgttgatggaagagagaaactgaggcatagtgcccagggccaggggaccgcaaccacccggcccttgtcactgtagcgttaaggctcagagtctgcgcagcagatatgtgtccgcacccgccaggccttcagcttccctcagacaggcgggaaaaccctaggctgcccttctccgagcggagggccgccccacacacagcaggcgcttaaacgggtacgcggggccctggacggctctccgcggagctccccaggctctggcgcagttccccggcttggggacctgagcaccgcctctgcctgccccagctgctcacctcccctttcccacagagcagggccagccgttcctgccagaagccagggcatgacccctggggtgcgcgtctccacagacccggtgagaatctcggcctccttgcgcgtgtcctccacctcgtgcccggcctcctcgcgcgcggccttctcacgcccggcctcctctttgcaccccgtccctactcgcgctcagcctcctccttgtgcccggcccctacttgcgtgcccggcccctactcgtgcccggcctctactcgcacaactggcctctactcgcgcacctggcctctactggtgcccggcctctactcgtgcccggcctctatttgcacatctagcctctactcgtgtccggcctctacctgcacacccggcctcctaaagtccgcgccaagctccccaaccacagcctgcctctgaaaggaccgcccacgccgcgctggaggtcagcgggcacgggtccctgtctgagtgggctttatgtttgtgcggccgtcattgcatacctgaggctgggtgatgtcagaaaattgtaggtgccccggctctgcagtctgaagttgaaggccttagcatgctctgcgctccaagatggcgcatcgagtgccgcttcctcagacgtcatggaggccaagggggcggaactcgcctttttatgatgacattaaccccacccataagccaccagaagaaaccagcctcctgtaggaatgtcagaaaacccgtacaaggggactggtgcgatggcttgtagctgtaatcccagctatgggggaggattgcttgagcccaggagttggaggctgcagtgagccatgatgtgccactgcactccagcctgaatgacagtggaaccctgtctctaaaaaattaaaaaacaaacccagatttggccgggcgcggtggctcgcacctgtaatcccagcactttgggaggccgaggtgggcggatcacgaggtcaggagatcgagaccatcctggcgaacacggtgaaaccccgtctctactaaaaatacaaaaaaaaattagccgggggggtggcgggcgcctgtagtcccagctactcgagaggctgaggcaggagaatggcgtgaacccaggaggcggagcttgcagtgagccaagatcatgccactgcactctagcctgggcgacaaagcgagactccgtctcgggggaaaaaaaaaaccacccagattcagtctttagacttctgctactagctttataactttgtttatcccctaggctgaagtgcagtgatgcaatcatggctcactgtgcttcaaacttacgtgctcaagtgatcctcccacctcagcctgttaagcagctgggaccacgggcatgcgacaccatgctgggctggtccactcctttattgctggctccctccatttcttatttcaagagacaaattattggaaacgggcatgatgccttagattctaagatcctccacctcatcagcagggcacccatccaggccccacagaaaaacctgacccaaaaccccagaccaaagggaactccatccgacccagcctggctggcatttaccagctaccccaccagcagccagtgccagggttggcttggctgaggacactcgtgtgatgtttcaggagcaagtgacgtttgaggacgtggtagtgggcttcagccaggaggagtgggggcagctgaagcctgcccagaggaccctgtaccgtgatgtaatgctggacaccttcaggcttctggtctctgtgggtaaggccacacccatgtcctatctgttgatctgtccctgacacggattctgattctaccaggttaaatatttataggactgagctttaaaagcaaatgcctggggctgtatgtcttgggctttaagaacctgactgttttaatgtaggaaatatcaattaagaccaatattagcaagtctcagactcaacctgaaatcaacagaagcagagaaacatgaggtgagggaaacatactgggtctgaagactacagaatcccagggtagaccagggtgttctgtagagctgttaggagcccctccttcttcaacacctccctctgcacttctgtcttagtctgttagggctgctaaaataccttagactgggtaattttaaacaatagatatttgttgctcatggttctggaggctgggaagcctaagatcaaggtgtcagcaaattcagtgtttggtgagggcttgctcctcactgatggcactttcttcctgtgtcctgacatgccataagggcaagggagttatctcaagcttcttttataagggcactgatcccattcatgagtggagccctcatgaattaatcacttccccaaggccccacctcaacactatcagattaggtattacattctaacatttgaaccttatttatttatttatttatttatttgtttttaaattttttatttttgagacagagtctcgctgtgtcacccgggctggagtgcagtggtgcgatctcggctcactgcaagctctgcctcccgggttcacaccattctcctgcctcatcttcctgagtagctgggactacaggtgcccaccaccacgcctggctaatttttttttttttttgtatatttagtagagacggggtttcaccgtgttagccaggatggtctcgatctcctgacctcgtgatgcacccaccttagcctcccaaagtgctgggattacaggcgtgagccactgcgtccggcctgaaccttttttatttttaagaaacagggtcttgttctcttgcccagggtggagtgctgtggcacagtcatacttactgcacacttaacctcctggctcaagtaaaccttccatttcagtcttccaagtagctgggactacaggtgcataccaccacacctagctaatttttaaaatttttgtagagacgggtccttgctgtgttgcccaggctgccctcaagcttctaggctaaagtgatcctcccacctcagcctcccaaagtgctggaattacaggcataagccactatgcatagcctgaattttagggggacaccaacattcagaccatagcaatctctttctggcttcatttccagagaggctcctctggaggtgacaagacaactgcctggggtgcctttcctgcaaccaagaccagcagaaaagacaggatctgtgtcccagggttgtcctggtttggctgccaggtcttcttcacagtgatcattgatgccagtgggcaggggaggaaccagagttctgattgtccaggcttgggtcacatgtccaccccagaaccagtggtagggtcagggactgagagtaggggaatgagtccctgaggaacatccagggctgtgggtatgacagctgaagtcactcaggggtccccagccatctgggacctggaagaccaaaggtggaatgggctgaggctcaggaagggtcctgggatacaaatgctcactctatgggtctctccctgagcaggacattggttaccgaagccgaatgtcatctccctgctggagcaagaggcagagctgtgggcggtggagtctagacttccccaaggcgtgtacccaggtgagatgggagcccttcggggcagagagaagcctgtccatgcttgcttcctggtttctccctctgcatctgctctctaattcttcagagcaaatttactactcagtcttagtgaagatttaccaagcacccattttgctgtgagtgacgacaccacgtcctcatctccactgaatttatattcttggtgagggagtgggggaaacaaacaataaatcggtaaaataataataataaaacaagttggatgattacagattgtgatgaatgccgagaaaatgaaaatgagcaatgaggtagactaggagggggatgagtagactttagcagagagatgagggatagcctctccaaggaggtgacatgtgacttgaagcctgagccatgaggcagtctgagtgaacagtagtatttcaggcagaggaaacagcaggtgcaaaggcctgaagtcatgcatcagtcagcttttgtgtaggaaaacactctgacctcagtggcttaaaccaaataattgtttataattcatgtgtctgtgggtcagtggatccaggctgggccctacgccatgtgcctgtagggtgattggtaggtagcagaggtatcccagcccactgacaggcaatttcccattggcatcaggtgggaagagtggcctgtcaccagagtccaggagggatggccagtgtgggaaagggtcacagtagggtccctccacatcaataacagcccttacccaatatattagcttcctattgctcctcctgcaaccagttacaaatgacccgtgaataacatgggtttgaactgtgtgggtccatttatacatggattttcttctgcctgagccacccctgagacagcaagaccaacccctcctcctactcctcagcctactcactgtgaagacaatgaggatgaagatctttatggtggtccacttccatttaatgcatagtaaatatattttctcttccttatgatttttttaaatagctttttctttagcttactttaagaacacattatataatacatatacaaaatatgtgttaattaagggctgggagcagtggctcacacctataatcccagcactttgagaggctatggcaggtggtatttgaggtcgggagttcaagaccagcctggccaacatggtgaaaccccgtctctacaaaaaaaaaatacaaaaaaaaaaaattagctggccatggtggcacgctcctgtagtcccagctactcaggaggctgaggcaggagaactgcttgaactaggaggtggaggttgtgatgagccaagatcacgccactgtgctcctgcctgggtgacagagcaagaccatgtttcaaaaaaaacaaagtgttaactatttattttatcagtatggtcaacaataagctattaatagttaagtttttggggagtcaaaggctatacacagattttcgattgtactggggtcagtgcccctagccccctcattgttcaagcgtcaacaatactacacttcgtagcataaagcaaagcaaattattttaaagttcgggagatcagaaatccacaatgggtctagctggaatataataaagatgtcagcagggcatcattccttctggaggctctagggaagggaagaatctatttctttctctcctttttgtttttttaagagatggggtcttgctatcttgcctaggatggagtccagtggtatgatcatggctcacagcaaccttgaccttctgggctcaggtgatcctcctgcctcagcctcctgagtagctgagactacaggtgtgtgtcaccatgcccagctaatttttttttattttttgtagaaacaaggtctcatcattttgcccaggcatgtcttgaactcttaggctcaaggagtcctcccacctcagctgcccaaagtgttgagattacaggcatgaggccctgtgcctggctaagaatccgtttctttgcatttttcagcttctagaggcacccacattccttggctatggccttgtccatcttcacagtcagcaaggcctggtcaagtcacatcatattcactctgactctgacccttctgccttttttccccatttaaggaccctcgtgattacacaggtccacccagataatccagtgtaatttctctatcttaatgttagctgattagcaaccttaattcctccctcccatgtaattggaaacatacaggttatagggttaggatgtgggcatcttgggaagccactattctgccattcactctggcttaacttttttttttttaattgaacttttcactgaaacataacaatatggggaaggtgcccacatcacacctctaggccactgtggggtcagggtaggggcagcacacacccaggtcatggctgtgcagagagggctgggtaccagggcaaaaagagagtcctgccatgaaggaggaggagggaatgcatttgttcattcattaagcatgtatattgagctcttgctgtgggctatagatacagtggtaagcaaggtggacggaaacccctaccctcaaggggttcccagttagtgaaatggacaaaataaggcagaccaaagcactctaatatgccacgggtcatttttcttcctcttagtgatgtacattgcagctattcctgtttgtggggagcagttaggttcctttacatctagagtgaggtggcacaacagcatatgctgtcgggaagaagctgggtatcagccaactttccccatgcagcacgtttttctctgttgccacctggcattgtggaggccactgtagctggagcctgggtgccacactgctccttccaagtccagtgcctctgtgtgtctgagtgctctctcctgggcatccgctctgcatcctcctctgtgctcccctcacagactccattcatactccttgtgccaactgttttttcctccctctcctcttcctttccttattctgttctttcctcttcctttccttattccttattttcctcttccttattctgtgtttccctctcttcctttcctggtttgcaaaactatatttttaaatggtcaaagccacttgaaccttgaacgtttcaaaataattagttttatccttcctcttcccatctcaccacaaactcttttgccgtggaacagagattaagggacatttccagtttttgcttctttcagacttggaaactagacccaaagtcaaactgtcagttctaaagcaaggcatctctgaagaaatatccaacagtgtcatcttggtagaaagattcctgtgggatggtctgtggtactgcaggggtgaggacactgagggccactgggaatggagttgtgagagtctagagagcctggcagtgccggtggccttcacgcctgtgaagacgcctgttctggagcagtggcagaggaatgggtttggggaaaacataagtctgaaccctgatctcccacatcaaccaatgactcctgaaagacaaagcccccacacatggggaacacgtggaaaaagggagaagccagacctaaatgttttacagaaaacctgtgtaaaagagaaaccctacaaatgtcaggaatgcggaaaggcctttagtcacagctcagcacttatcgaacaccaccggacgcacacaggagagagaccttacgaatgtcacgaatgcttaaaaggcttccggaacagctcggcacttaccaaacaccagagaatccatactggggagaaaccctataaatgcactcagtgtgggaggaccttcaaccaaattgccccactgatccagcaccagagaactcacacaggtgagaagccctatgaatgcagcgaatgtgggaaatccttcagttttaggtcctccttcagccagcacgagcgaactcacacaggcgagaagccctacgagtgcagtgagtgtgggaaagccttccggcaaagcatccacctcacccagcatctgcgaatccacactggggagaaaccctatcagtgtggtgagtgtggcaaggccttcagccacagctcatccttgaccaaacaccagcgaatccacacaggggagaagccctacgagtgccatgagtgtggaaaagccttcacccagatcacaccactgattcagcaccagaggacccacacaggagaaaagccctatgagtgtggtgagtgtgggaaagccttcagtcagagcacactcctgaccgagcatcggaggattcacacaggagagaagccctatggatgcaacgagtgtgggaaaaccttcagccacagctcctcactcagccagcatgagcggacacacacaggagagaagccctatgagtgcagtcagtgtgggaaggccttccggcagagcacacacctcacccaacaccagcgaatccacacaggggagaagccctatgaatgcaatgactgcggcaaggcattcagtcacagctcgtccctcaccaaacatcagcgaatccacactggggagaagccctacgaatgcaaccagtgtggcagagccttcagccagcttgctcccctcattcagcatcagaggatccacacaggagagaaaccctatgaatgtaaccagtgtggcagagccttcagccagagctcccttctcatcgaacaccagaggattcacaccaaggaaaagccgtatgggtgcaatgagtgtgggaaatccttcagccacagctcctcgctcagccagcacgaaaggacgcacactggggaaaagccctatgagtgtcacgattgcggaaagtcctttaggcagagcacccacctcactcagcaccggaggatccacacaggagagaagccatatgcatgcagggactgtggaaaggcctttacccacagctcctcccttaccaagcaccagagaactcacactggataaacccactccacatgtgctggggacataggaagaccttaagccatagctcatccctttctagatttgacccaatcatacacatgagaaacgtacattcatacacaagccttttcacacagcactcccctcagacaccctcagagagttcacactgatgggaaatgaccatgggaccaccaagctctaggtcatccatctctgcatccaaatagtagggaaacgtggagataatcaacactcaggaccttcagccttgaacgcccattagtgctatgttatagaacctacaaaaaagaaatggaacaaatgtagtggatccagggaacgcttttgtccaaggattcaccgtattccaaaccagagatgttcaaattggtgagaaacccaacaaatgcctttcatatatacgagaaccaaatgaagtcagaatttgccattattgcacatcacatttttgggggggaaagtgcttatgaatggtgcaggttgactctgatattcattcccaaatgacagtatggcagagtgttccagaaatgagagtggcatctttatggaatcactgtggatactgactgtctcagtaaacagctgtcttgtctgtgtgtatattgtttgatcagggtacatggcagccagtcacagattggaattacatatgacaaagtatcagtgtactataaacaggtttttagttatccctgcattatttttgcaattaatctttatatgcaatgagattgaaaagctttgtatgggaagactcaaaatgtaaagctgcttccgtagagtctcactgattctgagatggcttttgctgctctgttctccctctacatttctctgcagaactcgcgttagaaacacagatatttgttttacaaaaagggagatttttcctttgttaaaccatcgtcttataagcaatagcaaattcatgttagaaacttctgttttgcaagattcatcttttttgggatatgttcaagttaatcctctcaaactgctttttcattgttttcatacaatttaacattttgttaaaccctaagtccacaaatagcagtctttctgacaactataacctttaaatggtgacttgctgccctcattagaaattgcattggctggccaggcgcggtgacttatgcctgtaatcccagcactttgggaggccaaggtgggaggatcacctgaggtcgggagatggaggttgcagtgagctgagatcgtaccattgcactccagcctgggcaacaagagtgaaactctgtctcagaaaaaaaaaaaaaaattgcattggctgtttttggttattagctgttagttgtggttacatccatcaatttgatttttctaatcccaatgctgggatataaatttccagttacttgaaatttctctcttggggagaccatgttgcagatagtcttccaatattgcttctcattatgattgtggagtgcctcttgggataaatgcctttgtcatttacaagccaccggagagccaggcatggctgcacctgcctctagtcccagctgcttgggaggttgaggcaggaggatcacttgaacccaggagttctgggctgtagtgtgctctactgattgggtgtccacactaagtttggcatcaatatgatgacctcctgggagcagatgaccaccagcttgcctatgtaggggtgaaccagagcaggtcaaaactcccatgctggtagggctcacatctgtaatcccggcactttgggaggccaaggtgggcagatcacctgaggtcaggagttcaggaccagcctggccaacatggtgacaccccgtctctactgaaattacaaaattagctgggcacggtggtgcatgcttgtaatctcagcaattttggaggctgaggcagtagaatcacttgagcctgggaggcggaggttacagtgagcctagattgtgccaatgtactccagcctatgtgacaagagtaaaactcaacctcaaaaaaaaaaaaaaaactcccatgctgatcattagtgggatcgtgcctatgaatagccactgtgctccagcctgggcaacacagcgagacaccatctctaaaaaataaaagccactggagaaagccagggtacacagtgcatagcagcactgtctcattgaaacaatgcaagtcatataaataactttaaatattctggtagccccatttaaaaaacaagaagaggcccaggcacagtggctcatgcctgtaatcccagcactttgggaggctgaggtgggcagatcagttgaggccagcctgcccaacatggcgaaaccatgtctctgctaaaaatacaaaaattagctgggtgcagtggcatgcacctgtaatcccagctactcgggaggctgaggcacgagaattgcttgagcctgggaggcgtcagtgagccaagattgcaccactgcactctagcctgggtgacagagcaagactgtctcaaaaagaaagaaaacgcaagaagaaacaggtgaaactaaaatttacccctatatatctcaaatgttagcagtttaacataccaatatgaaaaattattgagatatttgcattctttctgttacgtgacatcttcagaatctagtgtgcatctttttttttttttttttttttgagacggagcctccctctgtcacccaggctggagtgcaatggcacaatcttggctcactgcaacctccgcctcccgggttcaagtgattctcctacctcagcctcccgagtacctgggactacaggcatgtgccaccacgcctggctaattttgtagttttagtagagatggggtttctccatgttggtcaggctggtctcgaactcctgacctcatgtgatccgcccgcctcggcctcccagagtgctgggattacaggcgtgagccaccactcccagcctagtgtgcatcttatacttgcatcacatctcagagttgaccatagcgacatttcaagtgcccatttgacacgtgcagctcaacagtttggtctttggtcagctgttttgtcctccttccctttactacctgtgtcctcctgcctttccctgtgttcctatccttgtgtagcatcttgtgctcaaggaaaccaaatgtgctaggaagatctgctgctttaggtaattggaatgacaggtgcctactcatttcaggctccctaggatattattcttatcacagaacattacattcaggaaagagattatggccagtctattccagttcagttcagtaaaaatggaatctggcacatgcacttttgcagtcctttgaaagtgctagattggcataatcaccaagaaacggtaatgtgagttctttcctctccactcagcccctcttcatcagacctccttcagcgacacaggggaaatacagcaaggattgggtactacagagaggtgcccacagtatcacttctctcctaagccagggaaagagatgagattcctctccctgatggtgccaagccagtggaagggcactgtgggggttacaccctcctgagtctagaggaccttgcttactacgcctcagttattggcacacaagtagaagatcaagtgggaaaacaggtgaatgcaggtgaaataagaatgagggagagttctgaggctagttcagaaaaggccatacagcgtctgtctttttttgctggaacacttgtgcttggagccctgagacaccacttgagaaacccactggcccaaggccaccatgctgtgaggatgaagccacacaggctctgctcagggtgtcagttcactcctagtctgaatctccccagcctcatcaggcctgtgacagaacagtcttcagatgattccagcctcccagctttcaaggtacctcagccttcaagttcccagctgaggccccacacatggtggagccgaccaaagtcataaagtcatccttgaatgtgccttttttttttttttgagacagagtctagctctgttgcccaggccggagtgcaatggcatgatcaaggctcactgcagcctccacctcctgggctcaagtaattctcctgcctcagcctcccaagtagctgtgattacaggtgtgtgccaccgtgcctggctaatttttgtatttttagtagagacaaggtttcaccatgttggccaggctggtctcaaactcctgacctcaggtgatccacccgccttggtctcccaaagtgctgggattacaggagcaagtcactgcacccagcctgaggtctgtttttttaactgtgcaggcagccgctccactccacactgcctcttgctcctcctctggccatgtgatatgtctgctcctacttccccttccaccatgagtaaaagcttcctgaggcctccccagaagctgagcagatgccagtgccctgcttcctgtacagcctgcagaactatgagcctgttaaacctctcttttttataaattactcaatctcaggcatttcttgatagtaacacaagaacggcctaacacagtgagcacagtttctgggtgtgcagccatgagactgagaggaaggtctggttctttagcaaggaaaggttctgtctctttctggatgcaaagggagaagtatgctgcctaccacctgcaagcacagagaggaccatcctgtacagagtcaactcagagaagacagcaaagcccaaactcatctacaattcaagcaggggccccaccctggaccttgcatcctggtctttcacagcaaataaataataacctcagctgggcgtggtggctcatgcctgtaatcccagcactttgggaggcttgctcgaacccaggagttcaagaccagcctgggcaacatagtgagaccccatctatacaacagataaaaaattagccagtcatggtagcgtgtgcctgtactcccagctacgcagtaggctaaggcaggactatcacttgaacccaggtatttgaggctgcagtgaggtatggtttcaccactgcactccagaccatgtttctaaaaaaaaaaaaagtaaataatatcctaaagtgtatacaattttgagttggatttctggtgactggcagccaaaaatgcatcttgagtggaagaatcgtagaaagtagagaattaagtatcctttggcttcccattgtgtttctgaaaaaaagtcaggaaagctggtgcgatggtttggatatttgtcccctccaaatctcatgttgaaatgtgatccccagtgttggaggtggggcctagtgtgaggtatgtgggctatggggtggatcccacatgaatggcttagtgctgtcctcatggtaatgagtgagttctccctttatgagttcacccaagagatggttatttaaaggagcctggcacttcctcccctctctcttgttttctctctcactatatgatgcaccagctcccctttgccttccgccatgattggaagcttcctgaggcctccccatagtgcagatgccagcactatgcttcctgtacagcctgcagaaccgtgagccaaataaatctcttttctttgtaaattacccatcctcaggtattcctttatagccgtgtaaacagactaacacagccagggccgttggaagttttgtggaagcactgggtaggactgacgtgtggtagtcactgtccctcctgagtctcctcttatactgtatgtgagagggagattctttcaggcagcaagtattttccaagcaccaactatagctcaggcacaattccagactctggcaactaaactgatgaaactcgtggtctcaggagcttatattttggtggggaaatggaaaatagagaaattaggatgttatgggcacattacacagtaagtgttatgtagaaacaaaatggtccaagaagggaaaccccaggctgggcgcagtggctcaagcctgtaatcccagcactttgtgaggccaaggcaggcagattgcctgaggtcgagagttcaagaccagcctggccaacatggagaaaccccgtctctactaaaaacacaaaattagccgggcatggtggcacgtgcctgtactcccagctactagggaggctgaggcaggagaatctcttgaaaccggaaggcagaggttgaagtgagccgagttcgcacaattgcactccagcctgggcaacaagagcgaaactccgcctcaaaaaaaaaaaaaaaaaagaagaagggaaaccccaagtcctctggacttttttttttttttttttttttttttttttgaggtagggttttgctttgtcacgaaggctgtagcttcaacctcctgggctcaaatgatctatctgtcccacctcagcctcctgagtaggtgggactacaggcatgtgccaccatgcctggttaacttttaaatttttttagagatgaggtcttgctatgttgcccaggctggtctcaaactcctgggcccaagcgatcctcttgtctcagcctcccaaatgctgggattacaggcatgagccactgcgcacagcctctctggacttctcagttacctgagccaattcattcctttttggtttagccccatggcaggtaacacaaattcaatccaattaaagaaacacaactagtaagctgggtgtggtggctcatgcctgtaatcccagcactttgggaagccaagatggatggatcatttgaggtcagcagtttgagaccagcctggtcaacatggtgaaatcctgtctctactaaaaatacaaaaaatatatatatatatattagccatgcgtggtggtgcgtgcctttactgccagctacttgggaggctgaggcaggagagttgcttgaacccgggaggcagaggttgcactaaaccaggattgcaccactacactgtagcctgggcaacagagaaaggctctgtctcaaaaaaaaaaaaaaaaaagagaaaacacacacacacacacacacacacacacacacacaactggtaaattacctgcccctcaaagtgcagtgatgattaaatgagctcctggaatcccaaagcgtgtggcaaagtataaagtgaatgtaaaacatccgttcatttgcgttacttgtaaaactgtcatgcccattaaatgcccaaaaaaagaggctgtttctgaagacagtctctttgttatagtacacacatactttatatagcagcacacagatgtatatatttagataccgtatacattcttatagagaggaggaggtttaagctttagctgtccttaggagaagccaagagtgacaccatgaaaccacacatcgctggctcacatctgaactcagtgatttagatttctgctgggaggcttttctgccttcaaaggccgctccatgccatttctttttctttctttctttttttttttttttaaatccttagggtcttactctgtcacccaggctggagggcagtggtgtgatcatagttctctgtagcctggaactcctgggcttaaacaatcctgccttagcctccttagtagctgagactacaggcatgcaccaccatgcccagctaattttttattttttattaagacaggggcccactatgttgtccaggctggtctcgaactcccagactcaagcaatcctcccaccttggcctcccaaagcacttggattatagtcatgagccaccactccaccatggtccacgcatttctgtcacacactcacccccaagttctgtttattttaggagagtgagggctttaaaggaaggtctcagggtttactgtcaaaggaattgattcgtttattcttctctttgagcccagagtaaacaagtataaaccacacagaaaatgcccctggccctatgtgggttgcaagttagtgggcaagataggcaaagcaagtcatcagaagaaaagcaaggtgagtcatagcggagaaaacacagtaagacgggccagacgcagtggttcacacctgtaatttcaacactttgtgaggctgaggcgggtggatcacctgaggtcaggagttcgagaccagcctggagaacatggtgaaaccctgtctttactaaaaaatacaaaaattacccaggcatggtggcagaagcctgtaatcccagctactcgggaggctgaggcagaagaattgcttgcagtgagccgagattgtgccactgcactccagcctgggcgacaagagcaagactttgtctcaaaaaaaaaaaaaaaaaaaaaagtgataagatgaataccagcccagagatgataacaacttggggattattgtgtttggtgaatggggtgagggacgtcacattaaaaccatggcatcagggcaaacctccgtgaaaagacaggcagagccacagctggagagacctccccagtactggggccttggtgaggagctggggagcttagatttaccatgtcccagaagccaccctctcactgagcagatttccctggcagttgcccccatcgcatgtggctggtccctcaggagcctgtgtctcaagagctacctggtcagccagaggctggactttggaaagctgttcatttcattgagacatctgggaacctttctacaaattcatgttctctcgagttgagggaaggctgggctgcactatgttttgaggctctggcttcatggatttgccatgaaagtaagctgaaactctaggtccctcactttcagggatcccttcaagaccaagcgcctaattttatctttgtaattttgaattattcttctgaagagggacccctcagttgtgtgagccttaggcccaacaaatctggatcgacccctggttccagcaaccctcgtcttagagacttctgcatggacactgggaagacagaacccagcactgccaagggtaatggatctcccattttgatgtgagtgaaaaccacctgaaggtggagggtgttaaacctgggaccttgctttggttggtccgagggggtttggtaatctgcacaccaaggcactgggtgattctgaaacagacccggaagcctcaagtgagaactgtgcccaaacttcctgaagcagtttgtctgcgaagcccatagttcccaagtgtggccccatcccaggagcctctcaggttgaaggaacagctactaataaatcactgacttcactggactcagggtaggcagaatggagtatctgcctttctttgcatcaaaagcacatcaccctatcctgttctgtatctgcctgaaggaagtccacagggtattcccgagacccatcagacacctcactcattttttcatgatacccaagagacacacttagaatgtacgcagactacacatataccaaacacattatactcacatctcataccctgaaaaatgactgggagacataaatacactgagatgtcaaaaggagtagtctgttgcccaggctggagtgcagtggcacgatctcggctcactgcaacctctgcctctgggttcaaatgattcttgtgcctcagcctcttgaagtagctgggactacaggcacgcaccaccatgcctaggtaatttttttgtatttgtactagagtcaaggtttcaccatgttggccaagctggtcttgaactcctgacttcaggtgatcctcccacctgggcctgtcaaagtgctgggattacaggcatgagccacagtgcccggccgaatctgtgtttttaacttttacataattgggagaattctttttaaaatggtgaaaaatgaactttattataaaagcccatggctgggcgcggtggctcacacctagcactttgggaggttgaggtgggcagatcacttgaggccaggggttcgagaccagtctggccaacatggtgaaaccccatctctactaaaaatacaaaagttagccgggcatggtggcaggggcctgtaatcccagctattcagtacaccacggcgagagaatcgcttgaacctgggaggcagagcttccagtgagctgaaattgtgccactgcactccagcctgggtgacagaacgaggctctgtctcaaaaaaaaaacaaaaaaaactttcaaaggaatttaaaaaactgaaataaatgtcctcataatttcatgaccctaacacaactactctttgcatttctatactttgtctgctaggatttgacaactaatgcccactgtttacacagttgcaacagaatcaacagttacattctacttgaactacacttacaaattactcttccagcgccgggcgcggtggctaacgcttgtaatccccagcactttgggaggctgaggcgggtggatcatgaggacgtgagtttgagaccagcctgaccaatatgatgaaaccccgtctctactaaaaatacaaaaattagccaggtgtggtggtgcgcacctgtaatccagctactccggaggctgaggcaggagaattgcttggagctgggagacggaggttgcagtgagctgagatcacgccattgtactccagcctgggcaacagagcgagagcgagactctgtctaaaaaaaaaaaattcttcgattttgctagtcttaattatcatttatgcctttttactattgctttgaatggctctaccattcatatttaagtcatagtatttaacttcatgcaaaccagcatccttgtgtatatatatatttttggtccttttttttcctttttgtggaggaaaaagtggggtctcactatgttgcccagggaggtcttgaactcctgggctcaagggatcctcccaccttggcctcccaaagtgttgggattataggtgtgaaccactgtgcctggccccgtattgttactgaatacagttggactgttagctttccaaaatgattgcactagttgacactgattcataaaactctcctcaactcaaatagtgatggcagacatgtatttgtctgcttgggttgtgatcacaaaataccacaggctgggaagctgaatcaacaggaatttattaatattttctccctgttctggaggctggaagtcagagtgggttccacgtgaagcctctcttccaagcttgtagatggttgccatcctgctgtgtctgcacctgcctatggcctttcctctgtgtgtgcatggagagggagcaatctctggcgtctcttgctatctcttttttttttttttttttgagatggagtctcgctctgtcgcccaggctggagtgcggtggtgtgatctcagttcactgcaaccttcacctcccaggttcaagttattctcttgcctcagcctcccaagtagctgggattacagatgcctgccaccacacctggctaatttttcgtagagatagggttttaccatattggccagactggtctcgaactcctgacctcaggtaatccacctgcctcagcctcccgaagtgctggtacaggcgtgagccactgtgcgtggtcctccctctctttttttgagacagcgtcttgctctgtcacccaggttggagtgcgtggtgtatcacagctcactgcagctttgacctccagggctcatgtcatcctcccacctcggccccccacgcagctgggactacaggtacatgccaccacacccagctaatttttaagttttttgtagagacgaggtctagctgtgttgcccaggctggctcctgggctcaagggatccctctgcctcagcctcctaaagtgctggggttacaagtgtgagtcacctcgcccagcctcttgcttttcttataaggacactagtcctattggatgcaggcgccactccaacgacctcatttagcctatttacctccccaaaggccttgtctccacatatcatcagattgtgggttaaggcttcaacatatgacatttaattcagctcgtaccagagggtgtttaagcattttcccattgaaatgtattcccatctttccaggtgtccatctctcatttgcttttcctacttacttagaacacagctaccttccgacaccctgtataaacccaccctgaactctacccctcttcactgccaacctgcctggggttttcccttgccccctagagagctctgtgtcctttcgcacacatcccatccctgccaactccactggacagacctgagccaccctctcctgcctcaccccacccatctttcttgctggtccacgttgccacactgttgtatgggagctgagacccactgcctcaaatgcctgaaccagcccagctgcccctgaggttaacaagtgggaatgtctagcttaataaaacatccatttgtgctccttacatcctgggcagggtggtagtggtaggagaacagcaaacaaatcctgaaatctcaatcagttcacttttggtagtggtttgggaaaggaaattctgaaactatattagagttattttaagattcatcaaattagtaaaatgctgaattttggggtgtcagggttctcagtgttaaagaagacacataaaaatatgggctggaggaagtcatgaattgagttggaggtcttactggatatgtacgtgtatgtgcacagacacacctttgtgtgtgacctgtgtgcaatcatatgcacatatatttcatagctcagcagaagacacctcaactggcaccctatcttggtctctaatgccattacccactaaaaggaaccagttcttcaaagacatggccaatttcagggctgaggaagggtagaaaggagatgggcttggaacatcctactacaccaaaaagcaaataagtgctaaaaaaaaaaaatggaggcatgtcacaaggatgcaggagtcaactgaagggagtctcactggcctcatctaggacaacttgagcaccaaaataagatcagcagcgagttataaaccactgaataaacagaaatcctgagtccattccaacaataaagacaaattcttggggagaaggaagagtgctggctggcagtaggatgctgagggcctgctggtcagcatggagggagggctggtgttggaaaatcaccaccctggtaatgatggattcaggcaagaatcataaatgaaagccaaatttagggggaagttttgatgaggagcaggatatttgcattatctttaatctttttgtgacaactgaagatcattgatacttgcatgatcttaaagtatcttcccaccgattcttattcgttaaaaggagaaaaagttaactatattctttttttgagacagggtcttgctctgtcacccaggctggagtgcagtggctcaatctcagctcactgcaaccttgacctcccagtttcaagccatcctcccacctcagcctcccaagtagctgggactacgggtgtgcaccaccgtgcccagcttcagcctcacaagtgctgagattacaggtgtaagcctctgcatctggcccagttagccatacagtggaaaaactgcactctaaccaggtgagcaaagagaacatcactgacaggaggaatgtggacaccgtgcaccctggatgggatgggggaaggcgcacacatgcaggccacaggtaagcagggtcgaatgttaataggtgggtctggatgagggtttgtggatgatctgtgcactattgtattttatttattgattttttttttgacacagagtctcgctctgtcacccaggctggagtgcagtggcgcgatctcagctcactgcaagctccgcctcccaggttcacgccattctcctccctcagcctcccgagtacctgggactataggtgcccaccaccacgcccggctagttttttttgtatttttttagtagagacggggtttcaccatgttagccaggatggtctcgatctcctgacctcatgatacgcccgcctcggcctcccaaagtgctgggattacaggcgtgagccaccgcgcccggccaatctgtgcactattttaattcttgtgcctttttaaaatataagtttgtaattatttccaaatagaaaactttaaaaaaaaaaggcatagacatctggctgtgcactaaatgagacaggagatgggaaactgaaggtggtgaagccctataacaaatgacgatcacccacagcctgagagctgagtgggacacatcacaggggatgctccctgtggcagtgcaagaaggtgagctcacaggttcggctgagaaatgggagggtacattttagcctttttcttttctttttttttttttaatgagatggagtctcgctctgtcccccaggcaggagtgcagtggtgtgatcttggctcactgcaacttccgcctccccggttcaagcgattcccctgcctcagcctcctgagtagctgaaatcacaggtgcctgccaccacgcctggctcattttttgtatttttagtagagatggagtttccccatgttggccaggctgcttttgaactcctgacctcaggtgatccacctgcctctgcctctcaaagtgctgggattacaggcgtgagccaccgtgcccagaccattttagcctttttcttaccagaaccacactcagcttggggcttaagatggataggctaagaggggaactaagcttgtaactgttgcggagacaggcactccaggtgacagttcacaggccctttcaagtgactggagccatgggatcatttctctccaaggatttgtgagtagaagtgatgtgtgtcatctcccaggtgaacaggttcggccttccctacatgctccaagggtacagtgaagagcagagctacaacagagatggggcctggatccctgaatcactgtatggagcagagtgcaaaccaatatataagcaacagcaacaccaacacaggacaatcgactgttagtaaataatttttttttctttttttcttttttttctgagatggagtcttgcactgtcacctaggctagggtgcagtggcacaatcttggcttactgcaacctccgcctcccaggttcaagcaattctcctgcctcagcctcctgagtagctgggattacaggcacgcatcaccacagctggctaattttttgtatttttagtagagacagggtttcaccatgttggccaggctggtctcaaactccatgatctgcctgcctcagcctcacaaagtgttgggattacaggtgtgagccaccacgcccggcccatgaataagtacttactaagtctctgtgatttgggggtcattacaacagactgcctgctcaaacacagtgacagaaaaagaggcaccagtttctgtatctacagggagcagttaagtttatgcgcagggagcagttaagtttatgcgcaggcaatgggaatgatactgtaatcttgagaataaatgcaatcaatgaaaagatcaccttatgtagcccaaggagtttagtctcctttgctcagacagacagatctttattagtgttttcaacttattttgctcacaacttcccagcaagaaatgtcttacattgcaaccagttctcacatttagatgtatgggtgaaaagtttcacaaaacagtatttgcctttactacatgatgcattctggcctactttattctgcttcattgctgtgtaatgctggtgaccacttgctaattgatttcccattttactaaatgggctgggacccacggtctgaaaaccctgccttaggctgcaagcatttctgtgatctctgcgagctactccatataggtaaacacacgcgaggtaaactaggaaacagcttctgcttttgcagattagaagtgaagttgacatcacgccaagtacgaaaaggctaaacagctgacaaaatttccacttgagcaaccctggggagcgcaaacaggaggaatcggggcaagggtgacttgaagaaagcactggcagatcacgcactttaaggcaactctacactgcacaatgtcaaataacctagcatggggcggcactaaatggctgcaggaaagccgagtcttcttccacatccggcggctcccctcggatgcgagcgctggcccagggtgtgtttacagaggtgagggcttcccgtggacccttctcgttgggagcgcttagcctcaggagcggattcagggcacaggcagaggacgtccacaaacaccacaggaagccgccacccaggggcgtggaaaggcccaatgcctcgtctgggattcacggccggcaaagcggcccctccggaacgggacagcacagcggctcacctctgcgcctctgggggtgcggggggagcctcgccctccacgctctctgggggaccgcccgccctagcccccgcctgggcttcgcgggtggacggttgggggccccgggcgccccccagcgcgtagcttttctccttctcgtgggtcttctggtgctcggctagggccaggctgaagtggaaggtcttccagcagccctgacaggcgtagcgcttccggccgccatggctgctgtggtgctccatcaggtgcgagagccacgcgaaggcctccccgcactcgccgcaggcatagggcttcccgcgggacaagcccggctcgtcagccccagggccctgcccggcctccagccctgcgctgtcgccggagctagagacgccctcgaggctctgcccgtccccatcctcggggtgcggcctcttggttcccagtttcgccgtgcccctgtccggggcaggctgctggatgacggactgcctctgcgatccggtggcagagtcggactccgcgtcctgggggtcctgcgggtccggggccttcccaggctgctcttcctcctcctcagtggtgcccgacgggggatcggcaagggcgtccccagggggcgcctccgtaggcagctcaggcagcacccccgcgggggcggcctcctcgcaggcgcacccagcgctctcctgccgcctcccgccttctggaacaaggtcagagccctagcgtgagcgccccgcccagggccagggagaggaggacccagccgagcctcagctgccggaacagcgcacagggctccgggctctggatccccgcggggctcacggctgtttggaagcagcgctgtccctcccaggcagccctgcagcgcatgccccgcgcctgctgctgcagatgtgggacctggaggcctccaacaacggaggccaccgacaggacaggaaggacagccccactgagcccgggttctggaaaccgcgcctttggaggtctccacctggccactagcttggccacaagatgcacgatgcaaggagagcctgctcagagcgcaccctcctggagggaggggcccggctgccagcgaagagagtggggtcaatagctaaggccaaaccccccagcgacaagccccctggcgacaggcacccagggccctccagcccaagtccgcctctaggtgttcttgttggtgtgctggcacagagcctccaatggggcagaacggccacccccgggaccagtcatacacagatcctggcaactaacaccactgccgtttccaccgaccaagtcttggggtggtctgtcatgcagcaagagaccatggacgtaactggattcctgcctcactcagacacggtggtgggagaatggtgaagcagtcaatgctgaggtctttgctggggctgatggcgctgggaggggccccctcagcctctgaagaaaaagcaaaccccacccggccctaacaccaattcaacccaacctcacctgggaggctgcttccttgtggatctctttccaccaaccggagttcctcagtgtccagcctggaggcagcgtcaggctgggaaagctgataccctgagtggggttaaaaaccaaagaaataaaaggcatcaacacagagtggctgatgggtgttgtgtgtcgtgggccagccagggcaggctgcagcccacctcctcttctctgtactgggacccccaccaaggccacctccctgttaggcccctggacagtggagcaaagaagaaggcgaggctggaagggcaacggggcaggcggaggcaggactcagagaaagcaaagctaaagaaagacattgacaaaaattgctcaggagtctgagtcggggggcctccctaaaaggagggtttctggggcaagaacgtctacaaaagaggagacccttgatcaggccatgcaggtgaggccctgtatctggcaaggagggtggcaatgtgggcgccttggggccaggaggcctttccaaattccgaggcttcagtcctacaggcagggcctgggcagaactcagatgtttagatcagaaagggtgggggcttcagcgaataaattcaagctccaacacgtgcaagttcaaatcctgtaagacatcacagtgtcccagccaaagtccctggggtcacagtctcctgcaccaacccctgcggaaggggatggggagtggggcgtgaccccgaggcaggcgactctcaccccacaggagcagcttccggtagctcttcaggttctcctcggcagggtccaggtggccccactcccccaggtgctgagggtcctctggaaaggacttcagcttctgaaacattagtcgtggctgagacctcccacctgccctagagaagggaggacccgccgcagccccacagccacaggagcaggctaggagccagccctggccagggactctaacccaggtgcactgcaggaggcagcccccttcgcaccacaaagattccgccctcacgctcccaccagggtgggttctgggcctcagcgctgtggacgtttggggccacagccctctgctgagcactggtgatggggagggggatgcctctaagctgaggccaaggcccctcacccacctgctcgtgcccacccacctgctcggtgttggcagggccgtcctcttcggtctttgcttctctgaccctcctctgttccagaaacagggggtccggagaaagccaggctggggagaaggagaggcagagctgaggcaatgagctccctgtggccaggtgccctcaagggtcaaggagcccccgctgcctcccacacaggccccagtgtgcttctgtgacagcagcacccaaggctcaacggacactacacctttccctgatttacaaagcagcgcggtggccacagggcttgggtggccccagagatgcccattcaagtccactggattcatggaaatcttttttttttttggtttgtttgttttttaaagacagggtcttgctctgtcacctaggctggagtgcagtggcatgatcttggctcactgcaacctccacctcctggactcaagcaatcctcccacctcagcctcccaagtagctgggactaaaagtgcggacccggctaatttttgtattttttgtagagatggggtctccctatgttgcccaggctggtctcgaatgcccgggctcaagtgatctgcccgccttggcttcccaaagtgctgcgattacaggcatgaggcactgtgcctggccttcgtggaaatcctaaaaagcaacaccacatagtgctgggctgtatccaggccagtgggcaccttccgtgctggtaatgaacagccacaaaacttctggaaaaccacatggaagtttctattttatgtgaaatgtcgaactcacacaccacttgcccagtggtcctgaggagtccacccacagtgcccagagcctcacatatgggcacacaagtcaggaggtgtcagggcagcttcactccaaggggcagagagcccacctctaggatggggatgggctgagcacgcgatgctgggcaactaaagaaccagacccaaccacagcctgggggacccacccctcgaacagcaagcactcagacacagcacaccacacacacagagcccgaccccaggccctgattatgcatgtgtgatgtgcagggagacatgaggggacgtgcatcaggacacttgagaccctttattttcagagggttcatggtcgggggttgggagattcttttctttatgtattgatgtttcttcactatttgtggtaagtatggatgatctgcataatctctgaagactaatttaataaacaatgtctaacattcagagaaactacaggaggaagtcccaatgatagcatggaccatggagcccctgactccctggctgcccttctgccctctcccaaccacaggcctctgcccaacaccccacctaaggcccagcagaggctgccaggctagctgggcactcacgtgtctcagaaggtgccgggatctccccagctccaagggcctggctggggctcgcgagctcgcctggtagcagcagagggtccatgtgcctctcgtacactccatcgctaagaattgaggatgagcccgcaggggagcccagcagcatccctgtcaacagtggagggacctgtgaccccaagaggtcaggacacgtgccaacaacaatcacacagttaaaccacagggacctgcaggctccagggccacatcactacccatcctgcacctcatcttggaccaggagacctccagcctgcaaagtacccagaatatttactgttaagaggctgggggccgggcgcggtggctcacgcctgtaatcccagcactttgggaggccgaggcgggcggatcacgaggtcaggagatcgaggccatcccggctaaaacggtgaaaccccgtctctactaaaaatacaaaaaattagccgggcgtagtggcgggcgcctgtagtcccagctacttgggaggctgaggcaggagaatggcgtgaacccgggaggcggagcttgcagtgagccgagatcccgccactgcactccagcctgggcgacagagcgagactccgtctcaaaaaaaaaaaaaaaaaaaaaaaaaaaaaaaaaaaagaggctgggctgggtgtggtggctcacaactgtaatcccagcactttgggagaccaaggcgggcagatcacgaggtcaggagattgataccatcctggccaacatggtgaaaccctgtctttactaaaaatacaaacattagctgggcatcgtggcaggcgcctgtaatcccagctacttgggaggctgaggcaggagaattgcttgaacccaggaggtggaggttgcagtgagctgagattgcgccactgcgctccagcctagtgacagactgagactccgtctcaaaaataaataaataaataaataagtaaataaaagaggctggtccctttccctcattcctctggcttccttacatctagaaggcaggagcccaggcatctgtcctggcccgaggaccaaggagctgcctcagcagtgtggggaacttaactatctcaggcaagccatggctggcactggggccttccaggatcccctccccatctcctctgagccatgcttctcctctgtgacagcccacctggctcttccaggacatcagcgaggccctccaccagggaggctgccttcttgcagctctcagggtactgtgccaccacccagggccggaccttatcaggcaggatgcccaggaactgctccagcaccagcagctccagcatctgctccttggagcgcgcctcaggcatcagccactggcggcacagctcatgcagccgggccagggtctggtggggcccggcagcctcctggtagacaaattcccggaaacgcaggcgggagaactccaggtcagcaggggtcctctcagggatggtctcgggttcttcctgctggactccggctgctgaccccggcgtgggcagatccggcggggctggggagctcctgggggaggcaaacgccttctccaaaggcaacatctttccaaaacggcactggaaaatgtgactgtctagccagggacaaggtggctccaaaggagaggtgccagggatgaccagatgcccagtgggctcaggtggtgccagaacccacagacctgcagaggacacggacaaggcaatggccttgcataaggccagggcgcagccaccccagctgccagagaacaaagacaccacacccagagttcacacagatttccaagaaacccgcttgttaggcatcagtagaacctcagtgttgtactcatgtagataaaaagtagcatgtaaatggagggtaactcattctgtgcattaccagaatttttttttctttgagaccgagtcaccctctgtcacccaagctggagtgcagtggcgcaatctcggctcaatgcaacctctacctcccgggttcaagcgagtctcctgcctcagtctctccagtagctggaattacaagcatgcaccaccacacccagctactttttgtatttttagtggagatggggtttcaccatgttggccaggctggtctcaaactcctgacctcaaatggtccacccgcctcagcctcccaaagtgctgggattacaggtgtgagccactgcgcccagcatcattaccagaattttaaaaaatcagtcatgaataggatgaaaatgaaaaattacttgacaatctctatgtaaacctggatgtaaaaaccttgaaataggccaggcgcggtggctcacgcccataatcccagcactttggaaggctgagatgggtggataacctgaggtcaggagtttgagaccagcctgaccaacctggtgaaaccccgtctctactaaaaatacaaaactagctgggtgtggtggtgggtgcctgtattcccagctacttgggaggctgagacaggaggactgcttgaaccctgaggcagaggttgcagtaagccgagactgcgtcactgcactccagcctgggcaacggtgagactctgtctcaaaaaaaaaaaaaaaaaagatagattatagggatgtcaatttctaataacatgaaggagctaggtgtcaagactgttcctccagttaaaaccaccacaaatctgaaataaaattatttagaaaaaagcgtagggagcggggggctccctctggaggccactgaacaaccacccacctccccgtttctggaaatggtgcaggatgtaggctttgaccaaagcatccacagaaccaggcgggaggggcaggaagtacccaggagcaaggacaatggggggtggggggtgggggagaccacaatgactgagagagttcaggtcctgccaacctgtgccccaccctcagctgaatccccacatacagggcagccctatcattaagtgaagccagtattcaggatgaactctcttgattgtaactgtgcaccaacaatgagctcactaaacagaacccagcgggtcacagctgtccaggcctccagtcggcctcgggctctcatgtcactggctatggacacacaagggtgtgaactgcagctgtccaccttctcccaggaaccgcctgggtctgaaggtccacagagacagctggaaggggatttcccacagccgcagcaagcccagttttatagggaaaaccatagagtaaaccacaccaggccaggtgctgtgagcccttctcaggtcgtcaagttctgctctgacagtgctccaccagaatatggggcgcaaagacctcaccgctgtggggtggggtgtggtgtgtgattccacagaaatgaaacatctagaacaggcaaatctatggagacaaaatgtagatcagctgttgccaggggctggggtttgggggaatgaggagggactgctaatgggtacaggatttcttctttggttggtgaaaatgctcaacggtgagtactgcatattaaaaaccaatgaactgtccactttaaataggtaaacctcacagtatgtaaattacactcaataagctgtttaaaaaacaaaacaaaacaaaaaaacagggctgggcacagtggctgacgcctgtaatcccggcactttgggaggccgaggcaggcagatcacctgaggtcaggagttcgagaccagcctggtcaacatggtgaaactccctctctactaaaaatacaaaaattagctgggtgtggtggtgggtacctgtaattccagctactcaggaggcctgaggcaggaggatcgcttgaacctgggaggtggaggctgtagtgagctgagatcatgccactgcactccagcctgggtgacagagcgagactctgtctcaaaaaaaaaaaaaaaaaaaagaaccagaagtttgcagagagtcaactatcaacctctctctctgtggctaccagagtttaaagggaagtgcggaactcttaagtgctgttggaagacattctacacaagcttccacttacctcaagcagaacagagccatgccgtgccatcatcaccaccaccacgatacctctactttttttttttttttttttaaacacagggtcttactctgtcacccaggctggagtgcagtagcatgatcatagcttattgcagcctcaacctcctgagctcaagtgatcctcccaccccaacctcctgagtagctaggactaaaggtgcacatcacccacacctggctaatttttaatttgttttgtagagacagggatctcactatgttgcccaggctggtctgtaacttctggactcaagggatacgcctgcctgggcctcccaaagtgctgggattacaggcgtgagccactgcacccacccccacccttttgttacctcataggcctgagctctcaactggcccctccgggagacttttcctctgcactccttgcacgcacccacctgacacccgctcactgcccccgccttttacctccctactgaccgcctcccccactggaatgcatacccaggagagtaagggttcttcacaggcaggtcccttggcctgggcagagctggctcagtgtgtgtggactgtgcaaacagtgcagttctgctgaggggtatgctggctgtgcctcatttgtttttggcagttgtggaccctcatgtccatctctgtggggtcctttctgatctatttaaaggacatatggagaagcaggatagctagggcacaggggacaacctcacgaccgtcacctacttatggcagcccccaccggggtgccctctctcctcacacactccacctgctgccagaggaccctcagacccaagcatctgcctgctctgtgactgagcgctttctcatgatttaatctctgagggcgggtaaactgcccactttcccgtgactttttctttacagctctttctgtcaaccagttaacgagttccctgtctggctctatcttgctactgtccccatctgtggcttgtcttttcactccacgctgtcttttggtcacaggtaatgtcctaatgtttcttactatctaatgcaatcacttttttttttggagacggagtctcgccctgtcacccacgctggagtgctgtggcacaatgtcagctcaccacaacctccacctcctgggttcaagcagttctcctccctcagcctcccgagtcactggggttagaggcacttgccccatgcctagctaatttttgtatttttagtacagacggggtttcaccatgttggccaggctggtctcgaactgctgacctcaagtgatccacccgcctcggcctcccaaagtgccaggattacaagagtgagccactgcagccagccttcaaccattttttaaattggacttcggagttcagaaacccacttaaaaagggtttctttcccttgggattagaaatacatcctctcctttaggaggccaaggcaggcagatcacgaggtcaggagatcgagaccatcctggctaacaccgtgaaaccccatctctactaaaaatacaaaaaaaaaaataataataattagccaggcatggtggcaggcgcccgtagtcccagctactcaggaggccgaggcaggagaatggtgtgaacccggcaggcggagcttgcagtgagccgagatcgcgccactgcactccagcctgagcgacagagtgagactctgtctcaaaaaaaaaaaaaagaaatacatcctcttattcatcctccaggaacagagaatagcagatataaagggccagacagtctcagtttcaactactcaactctgcctcgtggcaagtaagcaaccagagccctgtgcgtacccacaggtttggcatgttcttatgcatcttcatttacaaaaacaggtggccaggtgtggtggctcacacctgtaatcccagcactttgggaggccacggtaggtggacagcttgagcccaggagctcaagaacagcctgggcaacataccaaaacttcatctctacaaaaaatagaaaaattagctaggcacagtggtgcatgcctgtggtcccagctactctggagactgaggttggaggatcacctgaacccaggaggtcaaggcttcagtgagctgtgatcacaacaccacattgcagcctgggtaacagagtgagaccctgtcgcaaaaaaaaaaaaaaaaaaaaaaaaaaaaaattagccaggcgtggtggcacacacctgtggtcccagctacatgggaggctaatgtgggaggaccccttaatcccaggagttggaggctgcagtgagctatgtttgtgccactgtactccagcataagcgacacagcaagatcctgtctctaatgaatacaaacaaaacaggtcactgctggcctgcaggtgggtacgctaacccctgttctggagcctctcctgatgggaggcgtgacgccagctctaccccctggcaatggaggcacagagctctacttggtgcatggacagaggtgtggtcctgcaggcatgtaattttggctttcttaggacgccagaggcttgttcaccttgcagagaacctgtctccacaaaacaaactgtgagctccataatgtgtgtgcacagaaccttccctcatcagaacctcacaatcccagaggggtaggaaccacatgcagccccaaggtgcaagtgggaaatagaggcacgaggcaggcaatcactaaggctgggaccccacctgcaaagtgacgctgccactcatccttccccgtccaggcccataagcctgccctttaagaggcctcctgccggccctcccctctagccctcatggcctccacagtgggcagatcccagccagctcccccagcccctctcctcctgctccaacttcccagctctgagcatggtggaggcatcggggtctaggtagaatgagcaagggtcctcggccattggcaggggcgggatgacgtggggaggacgggacaccctccggctgggtcactggccaagacagtgggggacacatgtcagcccctggggacaggaacgggagctcctcgcctctgtgcccttccccctcagcattacaagttgtgagcctctctgggaagccacctctgcctccacttcctccattcacctgcaaagcagaagcttccatggaaccaggggtctcctaaaacgcccaactccaaggaagctgctgcctcctgtgaaaacagcctctccctgttcatctcccttcctactgggaccctgatgctcacagccaggaggatgaggccatctcaagagcctccagaaatctctggccctgtgtcttcttgcctccttcagccccattcctggccacactgtcaagaggactctcagagatctcaccggggcaggtgcggcagcgtacatctataatctcagagcctggggagtcttaagcaggaggactgcttgagcccaggagttggaggctgtgattggccactgcactccagcctgggcgacagaatgagcccgtgtctcacaaacaaacaaaatagagataccactgggaccctttcctgccacagcctgcttgaatgaggccacacctcgttggagtctggcttggtcactgggcaaacctccctcccctaatcttgggactgtccaggatttgcctcagatgggattttcctggagcccagccccccagcctcagcaaatgaagcaatctgcacaagtcttgagccagtcctgtaggctttgctgcacccagaggcctggaatacagaagctgaggcagagagctccacggtgggtgaggggtggctgagctgaggggtcccaagcctggtgggtctccagagtcctgcagcaaatccccttcatcctgggctgagcagagctcaagcctggtttggccctccgtgggcccagccctggccacctgaggaatattcatcgcagctctccatcccaccacactcatcggcagggtctagcaaaccaccccacagccacaggcctgaggatcagccagggaagctcaatgcatgggatgtggttgttgatgggtcgccggatattcccagggtctgccctggcttcatccacagatcacttactcattataaaaaggggtaaaagtgcttttaaaagaatgaaaaaacatggagtaagggtcgtcgttcacatctcagctgccttttgtggtccctgatccactcgccaggacagacagaaccagagagatgtcctgcgcaactggcctaggctccccgaaaacccgaggccagaaatacccaggaagtcacagattcaagcatcatgcacagaaaacagcaactcgatgcgacacgtggtcccgctctgactccagggcaggaaaccatccgcaggacatgatgggatgggggaagtgaaatggaaccgaggaggtgacatggaaccaagtgactgtgccactcagcctcgcccaggagtcagcaaggacacaggcgaatatatgggaaagtggaaggagggcagacagaaatgggggaagcggggagggaaggtagcagggagagagaagacaggagaggaaggagcaagagcagggaaagccagatagtctggacgggggtagagggggattgggaaaaggaaggagcccaggagggtgagagaaaggaaatggggaaggagtgatgggagggtgagtcaggcccccaccccaaccccctgggtcaggaccgaagccagtacacccactcttgcctcttccacgagagaggtctccggggtgggcgcagacacctaactcaaacagaacccacccccaggtgactggggagaggcgagatattccaagggtgggggcagcagagacaatgcccattctaggcacccctttggtccccgcaccctccatcccttccctgctccagcccctggggccacagcctgcccagcgtccccccaccacggacaccctcacatcctcacaccctcagcccccacttcctcccctcctcttcccttcaggagcctccccctcccttctcttccccactcaggagcctccccctcccccttttcgcccccctcaggagccttcccctcccccctttctcccccatcaggagcctccccctccctcatctctcccccatcaggagccgccccttcctgttctcccacccacagggtgccctaagcgcctcccctccacgagcctacacggggtgggggttgcactagttccctacctgcctgcagggcccctcaccgatctggatctcagccacctccggggggacccggcccctgccccgcactccacgcgaagggatgccagaccctcggcctcctggacgcacagcgggggctcgcaccccaaccccgggaacaccctggcccctttccctaacgctgcccactgaggcgtcctcaccgtctaccctgttggggtcgctctctgacccccgcgctgcatccccgggaccgacccacctgctgcgcagctaccccaggccggtcccagccgcccggagccccagtgcgcgatggcggccggcaaactgcgcctgcgcactgggcctcaccgcggactacgactcccacaatgccgcgaggctgtgccgcgcaccggggcgagcaagggagccgtgacaggtgacagtgcgcatggccaatcagacgcgagtgtggcctcccggcgtcccgcccactccggcgcctgcgtcattttgggcaccatggcaacgaagtaaacaagcgggtaaataatagacccctgacagccagagacccggagaaacaaagacggtgagaaacggagaaacaaagacaaaaagacgcgcagaccgggagggagagaagcatgaaggcccacagacgctcgggggcagaccaagacgccctggggtccccgaaacagagatgtacagagtcggacacggaaagggagagaccagctcacggttaagaaaggagggagaccagcccaggatcaagaaagggaaagaccagcatgggctcaagaaaagaaagagaccagctcaggctcaggaaaagagagagacccagagaaaaggagcactcgaggctgagacagatctggacagagatacagagacagggaccagcagacccagtactggggagacaagaggtggagacccagagacactgatgcgctaaaatgggttctacagtttcaaggagtggatagaactcaaagattacccaccccagggattcaggagctgctgaaatgagggaaatgtgagtggcagctggggtgagggctttggcaaagccccatataaatgtagcccccctggaaggcaggatagggccaggagctgcttcccatttcagttttccagatagaggcgcttatgaggatgccattttggtcgtttttgtgtgaactgatttttaaaatgtatatctgaacagtttatatattttaaatttacatacaccacacattttggtattcagttttatgaattttaactcatatccaccaacaaactcgggacaaagaatagctccactgcccaaaaatcctcctgctgcctcttggtagtcactccctccccacccataaccccaggaacagctaatctaagtagtccactgctacaattttgccttcacagtgtcatataagtgggatcatacagtatgtggcctcttcagattggctttttcactgaacataattcctttgagaggcattgaagtagtatgtatcaacagttcattccattttattgagaagtagtattctatggtatatagcagtttaaaccttctcccactgagagatattaggatcgttttaagtattttgctattaaaaataaagctgctatgaacattcgtgtacagatttttctgtgaacgtaagttttcacttttctgggataaaagcccaagagtgcagtttctaggtcacacaatgaacacgtgcttattagtgttgtaagaagctgccacactctcatgcagagtagctggaccattttacactcccaccaccaatgaatgtgtgaatccacttcacatttttatcagcatttgtgttttgctattttttattttggccattctgataggtatgtactgatatatcattgtggtttcaatttgcatttcccttaattgctaacaagtttgagcacactttaatgatttttttggcatttgtataccctcttcattaaagtatctgttcgtatcttttgcccattttctaatttttaaaaaaattgctcagttttgaaagctatgttttttttttttttgagacaaggtctcactctgtcactgaggctagagtgcagtggtgccatcatgaatcactgcagccttgaccttccaggctcaagtgatcctcacctcagcctcccgagtagctggaactacaggtgtgcgctaccatacccagctaatttttttttttaagagatggggtctcactataatgctaaggctggtctcagacccccgggctcaagcaatcctcccaccatggcctcccaaagtgctgggattacaggcatgagccaccatgcccagtctttccagtttattttaatggatataactcaggaactgccaaatggaagagatgcacagctaaggtctggtcaggggcactgaaggtgcagtgcatccatgtaccgtctgggtgagccatcctcccagcactcagatgtgttcaccaacccagctctctcaatcgtggggcagagagagggtccataccttctttaaggtgactatccccatcctgaagatatctatgggtcccactggagtcacctcattagcataaactcaggtgtggtcgaaacgggctccttatgaattgcaaaccctattcctattattcacaaaattccaaggcttttagctctgtgccaggaaccagggataaagatcaaatgtaagggccaggcgcggtggctcatgcctgtaatcccagcactctaggaggccagcgggcggatcacgaggtcaacatggtgaaaccctggctctactaaaaatacaaaaattagccaggcatggtggcaggtgcctgtaattgcagctgctcgagaggctgaggcagcttgaaactggaaggcaggggctgcagtgagttgagatcgcaccactgcactccagcctgggcaaaagagcaaaactccatctaaaaaaaaaaagaaaaaagatgaaatgtaggttttattacaccacagatggccaattgttcttgcaccatctggaaaaggctatctttcctgcattgaatagcttttgctccttaaaaaatcagtcaggaatatctttgcaggtctatttccgggttctcgattccgttccactgatctatgtgtctgccaataccacattgggttaccacggctacagagtaacaacatcaggtgcagttattcctcccactttttttttttttttttttttttttgagacagagtcttgctcagttgcccaggctggagcgcagtggcgcgatctcggctcaccgcaagctccacctcccgggttcacgccattctcctgcctcagcctcccgaatagctgggactacaggcgcccgccaccatgcccagctaatttttttttttttttttttttttgtatttttagtagagacagggtttcaccatgttagccaggatggtctcgatctcctgacctcatgatccacccgccttggcctcccaaagtgctgggattacaggcatgagccactgcgcccggccactttttttctttttcaaagttattttaactattccaagtcttgtgctttcccatatactttatcttcttcttttttttttttttttttgagacagagtcttgctctgtcacccaggttggagtgcagtgatgcaatttcagctcactgtaaactctgcctcctgggttcaagtggttcttctgcctcagcctcctgagtagctgggattacaggtatgtgctaccatgcctggctaatttttgtatttttagtagagacggggtttcaccatgttgaccaggctggtctcaaactcttgacctcaggtgattcgcccaccttggcctcccaaagtgctaggattacaggtgtgagccaccgcacccagccttttttttttctttgttttttgagacagaatctcactcctaaccatgctgctaatatttacatggtcctgcaccagtgtgttcatgtaatttcacataacttttttctttaattagggttgagtttcctatataggccttctaagcagccagagatcacacacttaaatgagcacctattagcttccaggcatattatgttttcttttataaataaaagcctcaaaatgcacacatgcatacacacacacacgattactgaccaaaaggtatttcagtataaaagctagagtagaagctccataaggacggtgacttttccctgtttaggcagcttactaaaaaaccccatatactcagccgggcgcagtggttcacgcctgtaatcccagcaatttgggaggccgaggtgggctgctcacgaggtcaggagattgagaccatcctggctaacacggtgaaaccctgtctctaccaagaaaatacaaaaaaattagccgggcatggtggcgggcgcctgtagtcccagctactagggaggctgaggcaggagaatggtgtgaacccgggaggcagagcttgcagagagccaagatcacgcaactgcactccagcctgggcgacagagcaagactccatctcaaaacaaacaaacaaacaaacaaacaaacaaaccatatactcttctgtgctgtttggcttccccccacattatgaactttaaaaatcttgcaataaaataacaattatggctgacacaggctataagaaagaaggcaggtaacaatgattattcagcaaggtaggaaggactacaatggcacacagacttgccattttgtactgcatcggatatgtcaatgttaattgtcatctcagcaacaagattttttccttgagagttgtatttctcctcaaatggactctcactagtcattcaattcctccttctgatattactcttatttcattgattccaagataacagatggtaacatgtacattttatgtgctaataaaaggctgcctgaggcctagcacagtgcctcacacctgtaatctcagcactttgggaggccgaggtgggtggaccacctgaggtcaggagttcaagaccagcctggcaaaacctcgtctctactacaatacagaaattagctgggtgtggtggtgtgcacctctaatctcagctacttgggaggccgaggcagcagaatcgcttgaacctggcaggtggaggctacagtgagccaagatagcaccactgtactccagcctgggtgacacagcgagactctctctaaaaaaaaataaaaaaataaaaaaaggctgccaattaaaccatatcactgattaacctggtttgttttcagatgttaaaatatggcaagatatgtatcacagaataaaggaaatacggtaagtctttaggttctgtgtcacgactaacttccagatataggcattaccttgttttcttgcactttgcttaattatcctatgcagatattgcattttttacaagttgaaggtttgtggcaacctgtgtcaattaagtctattgtcaccatttatcaaacagcatatgctctctgtgtctctgtgtcacattttggtaattctcacaatacttcaaactattgcattattattatctgttatggtgatctgtgatcagtaatttttgttgtaactattgtaattgttctggagtgaaaggaaccacgcctatataagacaatgaactcagcagataaatgttgtgtgtcctgattcctccaccaacctgccattgctcgctggtacgcactctctctcaatctctttcctcaggcctccctattccctgagacaaaacaatattgaacttaggccagttaataaccctacaatggccactaagtgttcaagtgaaaggcagagtcagacctctaacttcaaatcaaaagctagaaatgattaagcttagtaaggaaggcgtgtcaaagacaggccaaaacttagccctcttgtgccaaacagccaaattgtgatggccaagagaaaaacttgagggaaatgaaaagtgtgactccagtgaatatgtgaatgacaagaaactgaaacagccttgtcgccaatagggagaaagctttaatggtctggataggagatcaaactacccaaagagaactaacattctcttaagccaaagcctaatccagagcaaggtcctgactctcttcatttctatgaaggctgtgagaggcgaggaagatgcagaagaaaattctgagccggccaggcacagtggctcatgcctgtaatcccaacactttgggaggccaagcgggatggatcacctgaggtcagcagttcaagaccagcttagccaacatggtgaaaccccacctctactaaaaatacaaaaattagctgggcatggtggcgtgcgcctgtagtcccagctactcaggagtctgaggcaggagaattgcttgaacctgggaggcgaaggttgcagtgagctgagatcgtgccactgcactccagcctgggcaacagagtgaggctgtctcaaaaacaaaacaaaacaaaacaaaacaaaaaaaaagtctgggccgggtgtggtggctcatgcctgtaataccagcactttgggaggcagagatgggcagatcacctgaggtcaggagtttgagaacagcttggtcaacgtggcgaaaccccatctctgctaaaaatacaaaaaaaattagccaggcatggtggcaagtgcctgtaatccctgctactcaagaggctgaggcatgagaattgcttgaacccaggtggcagaggttggcagtgagccgagatcatgccactgcacactagcctaggcaaaagagtgagactccatctcaataaaataaaataaaataaaataaaataaaataaaataaaataaaaaagtctgaagctagcagaggttggttcatgaagtttaagtcatctccgtaacataaaagtgcaaggtgaagcagcaagtgctaatgcagaagctgcagcaagttctccagatttagctaagatcactgaggaaggtcgctacagtagacaacagtttaaatgtaaagaaaacagccttctgttggaagaaatgccaggtagtgttttcacaactagaaagaagtcagtgcctagcttcaaagctttaaagaacaggccgactcttgttaagggctaatgcaactggtgactttaagttgaaaccaaagctcatttaccattctgaaaaccctagggccttaagatttaagttaaatctactctgagtgctgtctataaatgtaaacaaagcctggatgacagtacgtgtttacagtatggtgtactgaatattttaaacccactgttgagagacttcctcctgagaaaaaaagattcaaattatggctgctcactgacaagagctctgatgaagacatagaaggaaattaatgttgttctcgcaactgccaacacaacgtgtattctgcagcccatggaccaaggagtaataattttgcctttccagtcttcttatttaagaatgcagtttagctggcccaggcgcagtggcctgtaatcccagcactttgggaggctgagacaggtggatcacgaggtcaggagatcgagaccatcctggctaacacagtgaaacccagtctctactaaaaatacaaaaaattagccgggcgtggtggcgggtgcctgtagtcccagctactcgggaggctgaggcaggagaatggcatgaacccggaaggcagagcttgcagtgagcagagatcgcaccactgcactccagcctgggcaacagagtgagactccgtctcaaaaaaataaaaaataaaaaagaagaatgcagtttgcagctatgcgtggtggctcatgcctgtattcccagcactttgggaggttgaagcaggtggattacttgagcttaggagtttaagactagcctggccaacatggtgaaaccctatctctactaaaaataaaaaattagccggccatagtggtacatgcctgtagtcccagctactcaagaggctgaggcatcaggatcgcctgaacccaggtggcagaggctgcagtgagctgagatcgcgccactgcactctagccgaggcaacagagtgagaatccttatcaaaaaagaaaaaaaaaggtatgtattttgtaaggctatagctgccatagatagtaatgattccttggatggatccagggaaagtaaattaaaaaccttctggaaatgattcactatgctagatgccattaagagcattctaggccaggcacaatggctcacacctgtaatactagcactttgtcaggatgaggcaagaggatcacttcggcacaggagttcaagaccagcttgagcaatatggtgagatgccgtctctacaaaacataaaaaaaattagccaggcgtggtggtgcatgctggtagttccagctatgtaggaggctaaggtgagaggacaacttgagcctagaggtcgaggctgcagcgagccatggttgcagcactgcactccaacctgggcaacagaatgagaccatgtctcaaaagaaaaaaagacatctggctgggcgcggtggctcacgcctgtaatcccagcactttgggaggccgaggcgggcggatcacgaggtcaggagatcgagaccatcccggctaaaacggtgaaaccccgtctctactaaaaatacaaaaaaaattagccgggcgtagtggcgggcgcctgtagtcccagctacttgggaggctgaggcaggagaatggcgtgaacccgggaggcggagcttgcagtgagccgagatcccgccactgcactccagcctgggcgacagagcgagactccgtctcaaaaaaaaaaaaaaaaaaaaaaaaagaaagaaagaaaaaaagacatctgttttttttgtttttttgtttttttttgaaatggagcctccttctgtttcccaggctgcagtgcagtggctcgatctctgctcactgcaacctctgcctcccagcttcaggcaattctcctgcctcagtctcctgagtagctgggattacaggtgtgcaccatcacgcctggctaatttttttttgtatttttagtagagatgaggtttcagcatgttggtcaggcttgtctcgaaatcctgacctcgtgatctgcccaccttggcctcccaaagtgctgggattacaggcgtgagccaccgtgcctggccaagacatctgttcttgaataatgagactggaaagtcaaaattactcctgatctatgatgggctgcagaatacatgttgtgttagcaggtgtgagaacaacattcatctccctgtacatcttcatcacagctcttgtcaacaagcagccatattttgaaaggaatctttattctgaggaagtctcaacagtgggtttaaaatattcagcacaggccgggcatggtggctcatgcctgtaatctcatcacttttgggaggccaaggtgggcagatcacttcaggtcaggagttcaagaccagcctgaccaacatggtgaaaccctatctctactaaaaaaaatacaaaacaattagtgtgatggtgggtacctgtaatcccagctacttgctcaggagtttgaggaaggagaatcgcttgaacccaagaggcagaggctgcagggagctgagatcacactactgcactgcagcctgggtgacaagagtgaaactctgtctcaaaaataaaataaaatattgagtgcaccatgcggtaaacacatgtgctgtcatccaggattttttcttccatttatagatggaaaaacatatttgttactttcaaacaacataaactcttcaacatgaagtctctgacaaagaggaggcaaagaaaatcagatcagtcactgccacagatgctcactgaatccccataggtctcagtccaatgtgtcaactctggtttctagcgagagcacagatacttgggaaaactttcccacactagacacactggcacaaggtcgcctgagcatgtaccttcttgtgcttggtcagacaggagctgtccctgaaggctttgccacaccgattacactcgtagggcttctcaccagtatgagtcctctggtgccagatgaggcccgcgatgttcctgaaaagtttgacactggttacagccacagaccttctcaccagtatgaatcctcttgtgcctgatgaggtacataatctcagtgaaagattttttcacattgtttaactcatgagatttctttccagaatgatttttttgatgcaaaagagctgactgttgtggttggagaatttttcacactccatacacatatagggtctctttccaatgtgaattctcccatgtttaataagttatgtgtgatcaatgaaggcctttctacacccagtacatacatagggctcccctcacatgtgaattctcagatggacaataaggttggagacatcagaaaaggatttttcacattcattacattcgaatagtttttccacagtatgacttctgaaatgcaaaacaagggaagagtggcagctgaaggtcttcccataccaattcctttcacagggcttctttcctatgtgggttttctcatgcttggtaaaggtggagccagcactgaaggctttcccacttcttgcatttataggatttctctcctgtgtggattttttgatgtacaatcaggttgtaattcttagagagggattttccacagtcattacaggtataagggctctctccagtatgagtcctctggtgactgatgaaatgagatttcggtctaacggacagtccacattcactgtcattgtattcatttccagagatacttccattgtgttcataaggacatgtgtccctatcaaacacctcctcgtgtccttctcctttgtgttgttcctttctctggcaattacatgttgttcactaaggtgtgtagaaaggctgaaggagttaccaccttcgttacattttgaaggctcatctccttgttagatcttcatcaaggtggctaggttgtccaccctggctgatggctgctctacagtcatcattttcctcaagaatttgaccgttagagcctttctgacaattatgtatgtaactaaaatgtttaacctttgagtcatgttcacagaaacctgttgtttgaggacctctttgacatgaagctaggactgagcagatgaccacaatggtcatggtgaccacagcccctcatagatgctctgggtccttgtgtgtggatgctgtttgcctcaaatgcacctctggatttctatggagcatttctacctggtcctcacattcccagacctctcctaatgcagataaaacaggaatcatccctgatgaacctttttattttcaccaaattggatagttccttcccaacaccatcccaagttgatgcttccatttgacttttgtttcccaggctggaaaggaaaaggggaaaatttttgaatccttagagaaaaaattgctagagttagaatggtaatgtgtaaacattaaaatcagccaggccagtatctattatatctgatgctgtgcccattctgtgacacagcaattccacttgcaagggtacaatcaaaagaaatgtgtatgtatgttcatagaaacactctttctaatagcccgagactagacactatccaaatgtcaccaactgggaaatggaaaacttgtggtttacttacatgatgaaataccacacattaacaaaagtgaataaactaagagtacacaaaaatatgggtacatttctcaggcatattatttgaaagaggaagtatatatactgaaagtgcacagtatatttactttgtgaaaacttctagttttacatttatgtattttttagcatgtatacttccaggaaaagcttttacaaaatcatatgtgcacacacacacacatcctaccaaataaattagccagatttttaaaaaattaacatagattttttttcagttatacacctgcatggtaggaagagaatataaagatggatgaaggatagtgaataaatatcactttagatattatgatttttaaaaagggacaggttctggttatgttgcccagcctgaactcaatctcctaggctcctcccacctcagcttcctgagtagctgagaccacaggtgcatgttaccactcacagaaaattttttaaaaattattttttgtagagacaagtctcactatgttgcccaggctggtctcaaactccttgcctcaagtgctcctccggcttcagccttccaaagttctgcaattacaggtgtgagccaccatgcccatcctctagctgtatttctgaagtcccttcactgagaagaacttgatctccaactgtccccaagatgcttcttcagtgtctcctgatgctttgcttttctgtctatccaaacagaaatcatcttccactctcctctccactcccattaccattcttccttcacctgtcccacccactcggcccctctgaatccagacatgcatactagactgtccaggcctcccaacccactcggcccctctgaatccagacatgcatactggactgtctaggccacccaacccttagagatctgcccatcattacaccctgaagagaccaaaagctgtggcatggcccatgctgcttctccctgagtcttcccaatcccagtaaacagccatcccattttctcagtggaagaggccagaaacctgctccactgggatggaacatactccattctccactctcccttttctcaaaagtcacacctaagctatcagctttgactttcaaatacacacagtatcctaccaatttacacttcctccaccactgtggtccaagttataatcacccttttattataaattgaagcataatttaaacagaataaattcaaagtggatgactcactgagtctttagatgtattttcatgagtgttcatatgtgtatgcacactccatgtgtgtatgacaatccatgatataaaacatacccatttttaggccaggcacggtggctcacgcctgtaatcccagcactttgggaggctgaggcaggtggatcacgaggtcaggagatggagaccatcctggctaacacagtgaaaccccatctctactaaaaatacaaaatatgagccaggcgtggtggcgggcgcctgtagtcccagctactcgggaggctgaggcaggagaatggcgtgaacccgggaggcggagcttgcagtgagctgagatcgcgccactgcactccagcctgggcgacagagcaagactccgtctcaaaaaaaaaaaattcccattttctggaggtaatcgctgctctgacctccattactacagactgctttgattggccctgaactccatgtgagcaggattgcaccatccacatgctcttgtcttggacttgtcattcaacagtagctctcatggttgtttgcatggttaaaactgaaccccccgaaaaaaattttttttaagacagggtctcattctgctaccctggcaggaatgcggtggtgtgatcacagctcacagtggcctccaaatcctgggctcaattaatcctctgcctcagtctccaaagtagctaggactacaggtatgcaccaccatgtgcagctacttataaagttgtttttttgttttttttttttaaatagagacatggtctcactatgttgtccaggctggtcatcaacccctggcctcaagcaatcctcccaccttgacctcccaaagtcctgggattactggcatgagccactatgcccagcatgtaccaaacaattaaagaagaattaataccaattcctctcagactcttccaaaacaggagggaacacttcctaactcatcctatgaggctagcattaccttgataccaaagccaggcaagcacactacaagaaacctagaaaccatatcccttaaatgttgaattcatcagtgtattacaaggattacacaccacgagcaagtaggactgttcatggaatgcaaggatatttcaacatgcgaaaattagttaatgtaagacatcacaataacaggataaagaaaaaaacacgaccatctcaaatgatgcattaaaagcattggacaaaattccaaacccgacccctgcctttctttactttttattttattttacttttttgtttttgagaccaggtcttactctgtgacccaggctggagtgcagtggtgcaatcatggctccctgaagcctcgactgccctggggtaaggtgatcctcccacctcagtctccccatagctgggactacatgcacaaggcaagattcccagtaatttttgtatttcttgcagagatggggtttttgccactttgcctagtctggtctcaaattcctgtgctcaagcgatacgcccatttcggcctcccaaaatgtcccgattacaggtgtgagccattgcgtctagccccaacaccctggcatgattaaaaaacatactcaaggctgggcgtggtggctcacgcctgtaatctcagcactttgggaggccgaggtgggcgtatcacgaggtcaggagatcgagatcatcctggctaacacagtgaaaccccgtctccaccaaaaatacaaaaaaattagctgggcgtgctggcaggcacctgtagtcccagctactcgggaagctgaggcaggagaatggcgtgaacccaggaggcggagattgcagtgagccgagatcacaccactgcactccagcctgggcgacagagcaagactgtctcaaaaaaaagaaaaaaaagtttaggccaagctcagctgacgcctgtaatcccagcacttgaggaggccgaggggggcagatcacctgaggtctggagtttgagactagcctggccaacatggtgaaaccccttctctactaaaaacacaaaaaattagccaggcatggtggcgggcaactgtaatcccagctactcgggaggctgaagcaggggaatcacttgaacctgggaggcagaaggtgcagtgaaccaaaatcacaccactgcactctagcctgggcgataaagcaaggctccgtttcaaaaaaaaaaaaaaaaaaagaatttaaaggggacaggtcaggatattgagaaacacaattttcacataaacaaaagggtcaagggccaggcgcagtggctcacgtctgtaattccaacactttgggaggccgaggcaggcagatcacgaggtcaggagatcgagaccatcctggctaacacggtgaaaccccatctctactcaaaatgcaaaaaaattagccaggtgtggtggcgggcacctgtagtcccagctactcgggaggctgaggcacgagaatggcgtgaacccgggaggcggagcttgcagtgagccgagatcacgccactgcactcaagcctgggtgacaaagcaagactctgtctccaaaaaaaaaaaggcggggcagaagaaaaatgtggggaatctgcattaggataacacagacaaaatggggcaggggaacaatcagatacgcatttgtgtctgggatgccggggtgactgcacttgtaaagataagctatcaatttgcattgccatggtgaagttttcacaacagctcaccaggaatttctttgtgggcaaaatatgggggaggcatgtagcatttcatcttgtagccaccttatttaggaacaggggaggcaggtttgcttgacccagtttccagcttgacttttctctttgactaaatgagtttggagtcccaaaattcaatttcttttcacaaccgtggtaagacttggctcaaaaataataccataatggctggacgcagtggctcacgactataatcccaggactttggaaggctgaggtgggtggatcacttgaggtcaggagttcgagaccagcctagggaacatggtgaaaccccatctctactaaaaatacaaaattagccaggtgtggtggcatgcgcctgaaatcccagctactcgggaggctgaggcaggacaatcacttgaacccaggaggcagaggttgccataagccaagatcgtgccactgtagtccagcctgggcaacagagagactccagctcaaaaaataataaggctgggcgtggtggctcgcgcctgtaatcccaacactaagggaggccaaggtgggcagatcacaaggtcaggagttcaagaccagcctggccaacatagtgaaaccccatctgtattaaaaatacaaaaattagcacggcatggtggcacgtgcctatagtcccagctacttgggaggctgaggcaggagaatcacttgaacctgggaggtagaggttgtggtgagccaagatcatgccattgtactccagcctgggcaacaggccgagactctgtctcaaaaaaaagatgataataataatgtcataatataattaggaattgggaaattttgaaaaggatgggttatcacatgataacaggaaattattgctcattttcttaggtgtgatacagtattatggttatgcaaaagaatgtctttattcttagaatgtatgtgccaacatatttatgagtaaagtgtcatacttgtaataaatatatatacatgtagacatacatatacttaaacacatgcacacataatacatatacgcacagataaatatacaaatgtacattatataaatatatacacaatatacacatacatatatacatacaaaaatacatgtatacacacatatgcccccaaatatataaacaagtatgtatatatacacgtatgcacaaatatacattaataaatatatagtgtgttatatattacaggcacataaaacaaatatggcaaaatattaattggtgaatctcggagtgggtgatgggcattcatgatactcttttttctcaacttttctgttagagtatttcagaaacttgtcaaaatataaagtaggcaggggaaatataaatgcctcctggagagatattccaggatcatcattcattaacaccttggtgaggtgaacttataacaggtttctcaaaaggcattcaagagacggttgtaagtgttcaagggggaaaaatatgatgctagcgctagaagctgttaaaaaacaactatggagttaccaactgggaaaatgctagtttgtaaggccctttccaggcaataggttttgttgcaggacactaaaggaaggccagaagtgtcagccactaagaactggagtcagggcaaggcagagctatccaaagcactcacaggttcctggggcaaaccctggaatcaactggccctctagctgctcccagtggttggcagctgatccaagttcaatcctatttaatctgtttgtgagctaaatattgtttctgagaagacaagtaagtgaaaatagggcaaatataattctattctggattcaacagggagcttactatttaaataaaacttcaaattccatttaaatattttatattaaagatatcactgcagaattaatgcatgttcattgcagaaaatctggaaaacataaataagtacaaagacaataaaaataatctataatctcactgttgagccttgggtgcatttacttcctgttttcttcacagagaatcattttgaaacaggtggagtcaacgtgtgtatataacttgggtccttttttgtttttcctagttaacattatattacgggtagttcccacaacattaacatgtctttgttagtataagaaatgccacagcctctctgaagaacaattcagaagaactaggttgaaataaaaaattctaaatgccaagagatgtggtggatccacactggcatcctttttacaatgacaaattaaaattcaaaagtagtatcagaggatctcacatttagcaagcgtggtttcatcaaacttttgttacagttagtatgcatgcaagtcatcatgtacatgtttctctcaatgcttgtgtgaaaattttgaaaacctacaggctagaaaaacccttacaaggatacacattcaacttgcctccctaaagcactggtggaaacgctgaaaacctggaaacttccaagatgttcatcaacaggaaaggcaagacaaaaaaaactgtggcattttcacaaggtagaatagtatagagcagtgaaggccggtgtactgaaagcttcacctagtacaaggttggggagagaagaaggttgcaaagtcttgtagcacataaagcatgccaatttcaaacacacgcacgcatgcacacacaaacaccccatactccatattgcccgaggcactggatatcacaaaggaaaaaactctaaaaaaaacccccaaaaaacggcctgggcacactagataaatgtgcagtgaattcatcacacaccccctctgtgatcttaagtctgtgggaaaagggccagcttcctgtggtcacaaggatggctctttttctttcattctgcaaacatttactgaacacgtactgtatgccaggacctgttctaggtatcaataattcagcagtggatcagacagatgaagacctccacctcacagagtaggcattctggtatgggaataggcaaagaactgcagaatctgtcactatcaaacgctctgcaaactgaggaagcacatacctgcaatccagtttctgagttacagctcctttcccaaaccgtcccaatctctatccactgcccacaactcaaaagccaagcaacctcagagaatgaactgccgaaggaagaagctagggcacggaatttcacctgatgcaagctccatcatcatcacctgcaacccagcagcaaacagtccttagcctagcagccccagtcctagggcatgtgaggattctgcctgttactgagtaaggagagtgtttagaggacagatgtgacctgacaggcttccactgaatcgtgaggaggccagaggcacgggagcaaggagatgcccgtaccagagagtagaggtgtggtgatgtggctaaattctggaaatatcttttttacttctatttttttgagacagagtctcgctctgtcagtgctggagtgcagtggcatgatcttggctcaccgcaacttccgcctcccaggttcaagcgatcctcctgcctcagcctcccgagcagctgggattaaaagcgcgtgctttaggggacatgtgagatcctctgacactacttttgaattttaatttatgtcattgtaaaacgcccagctaactgaattctggaaatatcttaaaggttaagccatgggattttggacagagacgatgtggggattggggaaaagagaaatatccaggtggacaaagaggattgtgggtggagggagtcaccacttggagagactagaaagactgagtttgggggagagtagatgctcagctgaggatcccaaagtctgagaggcctgtccctgggggtcagcattcgggcatcagaggtttgtggagagggcagcccagtatacaaccgcagggaagggaggaagggcaagtcagtggagtcagaacccagcagggatgggaggaagcctggctgggaatgttcacagtgggtaggaaggggaaggaacacacaaccctaaaggggcagaggaggaagccatctcttgggataaaggagaggaagaacagggttgttaggaggagtaggatgaaaagtggggaaagcgtccttgggagtaagacacgggaagcagaataggttgttcaagcccaaatcttgtgaggagaggcagaagggaggggcgtccgcacctgtgcaggaagagaggaggggtccataccctgggaaggtgagaaaaggccatctgtgcccgcaggaaaaaaaaaaaaagagaatattggggaggctgaggttaagggacaggcgaaaaaaaaaaagggatccgccccagtgggagggtagaggaagagaaatgagcccccgccccaaagggggcctgcgcccactaggagagagagttagagggtccgtgctccacagggcgaagggagaggaaattcggagttggcaccgcactggggagaagggtatgggggcccacgcccaacgaagaggagggagtaggggtccgcgccccaccacgaaaggagagtagagggctcgcgccctgcggggagaggcgttagggggtccgcgcccggcgaggagatgcgcgtaccagccccgcacgccaaggggagaagacacgcgggacggtccgcgcctggcggagagagttcctcacgcccgccccgccgggaaccacaagccagcgcccctaacaagcccctgcccagagcagggctgccgcgtaccctcacagacagaaagagcgaccacgcagccaccgcccagccccagccgctctggagtccttgaccccaccctcactaggccttggctccgcgaccggtgggcgggaacggaggaaacagacccgagaggccgcgagaggacggaactcacttcccgccgccgtagcgtcctcgtcagctcgccctccgactctccgcatgggcgcgcagagttcccggatgcgatattccggtgacaccggacgctgggggcggggcctagtgcgacgagggcggggccggggccggcccggggcggggccgtggccgcagctgcctggcagccagaacctgggagcgctcgcagtgctgcctttcggggttctttgtccttcgcttctgctggtaggtgaggtttaacagacggaaagacgccgggagcgcacgtgggctgccttgagccgctgcggacgagcaccttgtctctcaggttgaccagccgtatatccgcttgcgagcctgcaccaccctgggcgcgcgtggtctcggcagaatctcgttcacacgggtcccactcgtaggctgctgtgtctccttcctctcacggcgtcggggactggggcctggagtcactcctctacaggggtgtggaacgcgccaatggacgctgacaccttcatgcggtcgtttaacgctccgtgcacaataaccattttactcagttgtgtgatgctccatcgaaaataacccatttacacggttgtataagaccccacgacacgataacccctctacgcagttatgtaagactccatggcacaataaccccttcatgcggttgtgtaactctccatggcacaaaaacccattgccatgcataaggttccgtgccaaaataaccactttacgccattgcataacactctatggcacaataaccactttacaaggctgtgtaatactctacgccacaataaccctttcatgtggttgtgtaatcttccatggtgcaataaccacttcacttggttgtgtaatcctccagggcacaataatcattttatgtgatcgtataaaatgctccactgtgaatacaccatttgctcattttccttcctgtcagtggatatttgggctgtttccagttgggagttactacaaaggaacctgctgtgaacattgtgtgtgcatcttttgataagcaggtttgtatttctgttgggtgaatgcctaggactgcagctgtctcttcatgggtgcacctgttcaggttaggagataacactagtttacagtgccccctgcagtggtgtataagattcccagttgctccccattcttgtcaacacttggtactatctgttgttttcatttttgccattagtgtgatgtgaagtagcatctcattgtggtttctctgattagtagtaaagttgggcacactttcatgcacttattggccatttggacttttccttgtttatgagggggctggttcaagtcatttgccaacttttctattaagttgcattcttattgagatgctgagttctttatatatttggaggccaatcttttgttggctctacaatggtcttctcccactctgtcacttgccctttcacttgcataatattgctttctgatgaacataagttggttttttggtttttttttttttttttttgagatggagtcttgttctgttgcccaggctggagtgcagtggtacgatcttggctcactgcaacctctgccttccaggttcaagcagttctcctgcctcagacccccaagcaattgggattacaggtgcatgacatcatgcccggttaatttttatatttttagtagagatgggttttgccatgttggtcaggctggtctcaaactcctgacctcaaatgatccatccacctcggcctcccaaagtgctgggattacaggtgtgaggcactgtgcccagcccctttccagttttaaagccaggaacagggagtagattcctcacacttcagctctctactcgctccttcctcagcatctgactccagcccacaatctctgcttttaagggcatgtgtgctagattgggcccatccagataatccaggataccttcttctctatctcatgtcccactcatttcagccaaacttgcaatggcccaggctaccccagaatccatctggaactcacctagtccacatctcatattctctttggtcaggagtttctatcctctgtgattgaattacagtagcctctcctgattggcagtttcacttctccacctttgttacccgaggtcaactgtggtctgaaaatattaaatggaaaatccagaaataaacaattcataagtttcacattgcacactgctctgagtagcatgattaaatcccatgctgtaccacaccatcccgcccaggatgggaaccaggcatttgtctagtgtgtccacactgtataccccctattagttacttttagaagccaccttggttattaaattaaccatcatagtatcacagtacttgtgttcaagtaacctttactttaaaaaatattttataaattaaaccttatcacaggttaagtataagaaaaaacatagtatacagttagccctccatatgcgtgggttccacatttgtagattcaaccaactttggattgaaagtatttgaaaaaacactgcatctgtagtgagcgtgtgcagacttttttcctcatcattacctcctaaacaatacagtataaaaattacaaagtatttacgttgtattagggaacataagtaatctaaacattactatttttttttttttttgagatggagtctcactctgtctcccaggctggagtgcagtggcatgatcttggctcactgcagactccacttcccaggttcaagtgattctcctgccttagcctctctagtagctgggattacaggtgcatgctaccacacccagctaatttttgtatttttagtagagacggggttttgccacgttggccaggctggtcttgaactcctgacctcagctgatctgcccgccttggcctcccaaagtactgggattacgggcttgagccactgtgcccagcctagacattaaagtacactggaagatgtgtgtagattatatgtaaatacacaccatcttatatgagggacttgagcatcatctgatttggtgtctgagggcagttttggaatcaatctcccacagatatagagggacaactgtatatacggtttggtgtcataagaggttttaggcatccaccatggtactggaatgtatccccctggatttggtagggaggactactacatgttcattacagcagtgattcctgctaatttgagaaaagcttatttattattatttcatttcattttgtagagatagggtctctgtctgttgcccaggctggtcccaaactcctggactcaagtgatcctcccacctcagcctcccaaagtcctgggattacaagtgtgagccatagtgcccagcctaagaaaattttttcaataaagatcaagaggaatacaattcacacaaaaccatggggctcataccaatatcatagttgacaccacttcttcagaatgcttactctctggccacaactggtcaggggatgagtccatcccagaatctgaaaggtagaaccaagaggtagagatgctgctgacactaactgcaacacctgcatattttacttgagagctgcagacaccaaagtgaagtgcccagcctgggcattcctgacagtccactagggatttgtgtcttatgatacacacatttctacagagacataaatctgtaacttataactgtacacatcctgggaatgtaagacttttccccaataatggggttcattcttttgaaagtatgaacaagaaatgtatacacttaagccttggcacagctcacacctgggctggataactctgctgtgggggccattatgagccttgaaggatgtttagcagcagccccagcctccacctgccagatgccacccttcatcatgaccacccagatgtctccatatgtcccctgggggcaaaattgcccctggatgagaaccactgctcacagtgaatagatccacatgttcaagtgcgcccacaccatggaatattacacagcactgaggagaaaccacagctgcctgcagcaacatggatgagtctaacctacacaatgttgtgcaacaggcagacatctaattccattcatacaaacacatggtgaggcaggctttattccagaagctactacagaggggcttgggaggccagactcaactccagcttggacaagaacaagtgagggcttaaagccgagaagcagcagggtgtctggaggatgaaaaattactaagtgcaaacctcagagataaggggtgaattcttgccagaccaactcaagagaagttttcctaaaggcaggcccagggaagaagacattgaaggtgggggacaaggaatttgatcagatatcaaagtggagtggggagtgctacacacttttaaacaaccaggtctcatgaaaactcactcactatcatgaaaacagcaaaaggggaaatccacccccatgatacaatcacctcccaccaggtctgtcccccaacactgggaattacaatttgacatgagattttggcagaaacacagagctaacccatatcattctatccctgtcccacccctaaatctcatattcttctcatactgcaaaatgcaatcatgccttcccaacagtcccccaaagtcttaactcattccagcattaactcaaaagtgcaagtccaaagactcatctgagacaaggcaagtccctttcacctatgagcccataaaatcaaaagcaagtgagttacttccaaggtacaatggagggtacaggcattgggtaaattcccctattccaaaagggagaacttggtcaaaacaaaggggctacaggtcccatgcaagtctgaataccagcagggcagtcattaaatgtttaagctccaaaataatcttctttgactccatttctcacatccaggtcacactgatgcaagggctgggctcccaaggccttgggcactccactcctgtggcaatgcagggtacagcccctgtggctgctttcacaggctggtattgagtgcttgtggcttttccaggcacacggtgcaagctaacggtggacctaccattctggactctggaggatgatgaccctcttctcacagctccactaggcagtgcctgagtggggactctgtgtgggggttccaaccccacatttcccccatccccctgccttagcagaggttctccacgagggctccacccatgcagcagacttctgcctggacgtccaggtgttcccatacatcctctgaaatctaggcagaggctcccaaacttcaactctcgccttctgtgcacccacaggtccaataccacatgtaagctgccaaggcttgggacttgcaccctctgaagcaatagaccaagctgtacattggcctcctttagccacagttagaactgacgcagctgggatgcaggatgccaagtcttgaggatgcacagagcactggggccctggaccctggcccacaaaaccatttttctctcctaggcctccaggcttgtgatgggaggggcggctgagaaggtctctgaaatgccctgcaggcattttgctcattatcttgcctattaactttcagctcttctttacttatgtacatttctgcagcctttgattcctgccagaaaatgggcagcaaattttcaaaactttcatgctttgcttccagtttaaatgtaagttatagttttaggtcatttctttgattatgcaattgagtgcagactttaagaagcagccaggcgacctctccaacactgctgcttagaaatttattctgccagatactctaaataatctttctcaagctcaagttgtgtctgtcacagatctctagagcaggagcacaatgctgccagtctttttgctaaagcacagcgagagtgacctttattccagttaccagtaagttcctcatctctatctgagaccaccacagcccagacttcactgtccatattattagcattttggtcacaaccatttaagtctctaggaagttccacactttccctcaacttcctgtcttcttcggatcccttcaaactgttccaacatctgcacattacccagttccaaagtagcttcaggaatctttatagcagtgccccactcctgttaccaactttctatactagtccattctcacactgctgtgaggaactacctaagattcggtaatttatgaagaaaagaggtttaattgacttacgattccacaggctgtacatgaagcatggctgggaggcctcaggaaacttacagtcatggcagaaggtgaagaagtaagcatgtcttaccatggcagagcaggaaagagggtgaatgaagaaggaagtgctacacacttttaaacaagcaggtctcatgtgaactatcatgagaacagcaaggaggaaatctgcccccatgatccattcatctcccaccaggtccctcccctaacaagagaattacaatttgacatgagacttgggtggggacacagagccaaaccatatcagattctgttttgagacagggtcttgccccattatccagcccacagtgcagtggtgtgatcacggctcactgtagcctcaaactcccaggcttaagagattcttctgccttcttcctgactctccctcctgataagctggaactaaaggcacatgccatcacacctggctaatttttacattactatttgcagagatgggggtcttgctatgttgcccaggctggtcttaaatgcctaggctcaagcaatcctcctgcctcagcctcctgaagtggtgaaattacaggtgtgagctactatgcacatccaaacatcttgctcaaactggatcctatagggaaagggagaagcccaaggtcagagggctcaggggatcctgatttaagttgggtcaaggagagtctgcagtgcacttttctgtatgtgagctatactcaaacgcaactctctggagaagacaagtcagcctggtcccctttcatccatcaccacaccctgggacacagcaccatcccatcctgactccagagggttcaacaagggtccccgctagtcctccatgcccctgcacctctcaccatgagatcaccatatcccaatgtgtgtgggggagctttacttctctaaatgctctttcagggccactcttcccttcttcactccgtgcctccattacctatctactcattcctctctcaggactggctgcccacccttcccatgacacagctatcagaggcataccaaggttggctgcctcatgggagacagcaagtgccatggaggccacagctgatgccagacaaaagagaacacacacagagaaggaggcatggctgcttgaagctccccacgagctggcctgagggtccggacctcagaataccagcaccatggagacaccaggtcacacacacatgaaccttgatccagctaatacaatgggcctggctgaccccagtcctggactgactcatcactaatcttcactatcgtcacacctgtcccttctcccaggagaggaaattgtctagaggcaaaatcccaaggggatccactcatggggcttcaaggctgtgtcatccaccttgactggctttcactcggccagtactgcactgcctcggaagggccactccaaagtcatcccaaattttctacaggcttcctgttctccattctctgggactcactctctcttctacactgacaaccccttataacccaagtcccaaagaaggaagttattctcatgccctgggctttgggatgctgattccagagacgctactgcccaatgcccctccatccacacttacagcttccctgttgccctgatccagtccctactactaaaggtccaaagaaaccccaaattaacctccttttggcttcactttttaatttattaccaaattattatgccaacaagtatctgtaacagagaaaaaaatatgatacaaaattccagtccccaaagaaaaccacattttatttctccatcatccactttcaacatacatccatatgtgcacatatttttacatggctggaataatagtaaatcttctatttgatgcccctttttgccatattataaacattttcaacatggcaataaaacctttataatggttcacagtggctgaattagaagcatcctaaatgaacaaccatggaggtagtggtggggtgataacataaacataacaactcagtatttttgcttcaacaactaaagcaacaaaccacatctgttagaagcagccctttccatcttagcacaagcttgtttcagtctttttttttgaaatggagtctcgctctgtcacccaggctggagtgcagtggtgcgatcttagctcactgcaacctccacctcccaggttcaagcaattctcctgcctcagcttcccaagtagctgggattacaggcacacactactatgcccagataatttcctgtatttttggtagagatggggtttcaccatgctggccaggctggtcttgaactcctaaccttgtgatctggccgcctcggcctcccaaagtgctaggattacaggcgtgagccaccacatctggcctgcttgtttcagtcttaagaggaacgacttcattgttcattcacaggtaatttattcacctagtttgccctcctgcaacgagtcctcagcattattgcaggagtataatgcagacatacattcaaacaggaaaatctcacacattctgtggtgtgtgcagtacagcactgtgtggactctctcattgtacacctttgttgttacagaaaacacagtaagagcccctgccaaagcctctctttctgattacacttaaaaaaggttgattcaggccaggcagtgtctcatgcctgtaatcccaacactttgggaggctgaggtgggcggatcatgaggtcaggagttcaagaccagcctggccaacacagtgaaaccctgtctctactaaaaatagaaaaaattagccaggcatggtggcaggcacctgtaatcctagctactttggaggctgaggcaggagaactgcttgaacctgggaggcagaggttgctgtgagtggagatcatgccactgcacagtgagactctgtccgaaaaaaaaaaaaaagttgattcagtgtttgcttacgtacaaggtggaaactccctactacagggctcttcattccaatcatgttctgaatgcattcacaggttctctctgtggtgtcacccccatgtttgcacatttcattccagtgtgtgtgttgtcatgtctggtacagactgaatcatccccaaagacttttctgccctcatcctaagttgtctctggagttccccaatgagcagacttaacagtgtggctcagcaatgtctcacattcatcaattcactggatagcttaaaggattcttttctactgaccagagaggagtcagatctaagacacgcctcctaaacacaggagtgagagtgaactggaagactcatgtggcccccaaccattatgtttccatgggttgctctcccaggtgtgctctttgatgtcgaacaagggatgagctcttttggaacatttttccacactgaggacaccggctgggaccctccctgctatggagtctctgatgtactgccaggtgagagttctgcttgaaggacttcccacattctggacactgatatggggtctccttagtgtgaattctctggtgcttggtcagacaggagctgtccctgaaggctttgccacactgattacactcatagggcttctcaccagtatgagtcctctggtgcctaatgaggccagcgatattcctgaaaagtttctgacactggttgcagccatagggcttctcgccagtatgaatcctctgatgcctgatgaggtacgcactctcgatgaaagtcttgccacattctttacattcatagggtttctccccagaatggatcttttgatgcacaatgaggtgagagtttctgttgaaggatttcccgcactctgcacactcaaagggcttttctccagtgtgagtcctctcatgctgggtgaggtacgagccgtcccggaaagcctttccacatttgctacactcatagggcttctcaccggtgtggattctgagatgcactgtaaggtgggagatgtcagtgaagggtttcccacattcgttacatctatatggtttttcccctgtatgagttctttggtgcaaaattaaggatgaatttcggttgaaggtttttccacactctaggcattcataaggtttctcgcctgtgtgaattctctggtgctgtgtcagagctgagccatcactgaaagctttcccacatttactgcattcatagggcttctctcctgtgtggattctttgatgcacaatcaggttgtagttcttggagaaggactttccacactcattacaagtataaggcttctctccggtgtgagttcggtgatgcaaaacaagagaagagttccgtttgaagcatttgccacattcagtacatctatattgtttctctccagggagatttctctggttttcattaagcgatgagctcagagtaaagatgttctcaaaattcttaccttcatacgatttcttgcctcttttcattattttctgatgaccaagagaggtaaaatgattaaaagacttaacactttcagggtatttgtagggcttctctctcactggatttcttccatgaataacttccatggaatggttgaagccttttccacaggcatcactgtcaccagttctcttatctgcataacttttaggatagctgggtaaggcggggtcacaatccagaccactaacatttgagtcaggtgcatggaaaccatttgttgccagaactctctgagacggtggaaggtctgagcttgcaatcaaatgctccccaaaaccaggatattcacaaattgcttcctgagtccctggtttctccagagttaaagctgattgcctcaagtgtccctcctggttctcacagtcccaaccatcacctaaactggacaagcagggaacttcccttgtgaatctttccacttctacatcacagggtacttctctctcaggaaaattccgagtcgtcattttcaatctcatatcccaaactgcaaaaagaagaaaaatgcagacttaggtatatgaagctttatctgtaagagaaacagacaatgatgatgggctaggtgtaaagatgtgtatttttttacttgttttctcttttaaattcaaatttatacaaggaagaggtaaaatcgtagccaaggaatggaaccaagaacagattcaaaaagagccatgtagcattttcatcttcctagagagcaggcaggaggaatggacctcgggataaatcatcaccaaaaggattagtttgagatgtgagagaccagaggccaagcatccctgctccccctagaattccatcccagccactgcattcttgtccctgtcacacactgcccatcagtacacatttccaaagctctgacttcacaatgagcttacaacagcactgaaggaacagttctcaccccagctctgtcatcaaagttctgcattcatggataggacaaagcacaggcttggtgacctaaaagttctgggtctaagtcttagaactgtcaatgacctggcggggcacagtggttcactcctgtaatcccagcactttgggaagtggaggcaggtggatcatttgaagtcaggagttcaagaccagcctgaccaacatggtgaaacaccgtctctactaaaaatacaaaaaaaatcagccaggcgtggtggcacatgcctgtagtcccagctactctggaggctgaggcaggagaatcacttcaacctggtaggcagaggttgcagtgagctgagatcacaccactgcactccagcctacgcggcagagtgagactccatctcaaaaaacaaaacaaaacaaaaactgtcaaagactgccctgcatggttgttataaaaactggatcatgtcggccaggcgcggtggtcacgcctgtaatcccagcactttgggaggccgaggtgggcagatcacaaggtcaggagattgagaccatcctggctaacgtggtgaaaccccgtctctactaaaaaaatacaaacaattagccaggcgtggtggcgggcgcctgtagtcccagctactcgggaggctgaggcaggagaatggcgcgaacccgggaggcggagcttgcagtgagccaagatcgtgccactgcactccagcctgggccacagagcaagactccgtctcaaaaaaaaaaaaaaaaaaaaactggatcatgtacaaagcagtctccaaggctaggggatgaagggcattctgtaaatggttgcatgtgtcttcatgcatatcaatcttcctgtcaccatccttgtccattcagacttcacaatattaagacaactggttgtccattcattcgttcattcatttggtgggatcgggtctcgctctgtcattcaggctgaagtgcagtggtgtgatcttggttcactgaagcctcaatctcaaaaacttcaagcaattatcccacctcagcctcccaaaatgctgcaaatacagggatgagccattgtgcccagccttctttctattttttaaggtaaaatgaaaatagacccttgcctcagaatacatacatacatatatgtctacattctaggcaatttaaatatatatacatgtatatgtgtatatgtgtgtgtgtgtgtgtgtgtgcgcgtgtatttacatttcagaaggatacaggctgcaacataaagtcaaagtttaaataatgtagtatgccttcataagtgtggcagactttgatcaacaaaacttaaccaaaaaaccatatggccaagcattgggggtcatgcctgtaatcccagcactctgggaggctgaagtgggagttatcacttgagcccacacagaaggctgaggctgcagtgagctgtaattgtgccactgcattccagattgggcaaaagagaccatgtcttaaaaacaaaaaacaaaaaccaaaaaataaaaaacagacaaggattaagaagtctgatatcagcattcaaattttccatccaataaaagacacaataagagacaaaatgcaagtggcagatagggagaaaataggacttaaaagcacaaagaattattgcccaagagctatagaggattcttacagagagaaaataagatttaaaagcacaaagaattactgcccaagaactacagaggattcttacagaacagcacataaaaagaaaaaaaatgggcaaagtaatcaaagagcacttcgtgaagggaaaatagaaatgtcctgaaaacattggctgggagcagtgggtcacgcctgtaatcccagcactttgggaggctgaggcaggtggaccacaaggtcaggagatcgagaccatcctggctgacacggtgaaaccccgtctctattaaaaatacaaaaaattagccaggcgtggtggcgggcgcctgtagtcccagctacttgggaggctgaggcaggagaatggcatgaacccgggaggcagagcttgcagtgagccgcgatagcgccactgcactccagcctgggcaacagggcgagactctgcctcaaaaaaaaaaaaaaaagaaagaaaaaaaagaaatgtcctgaaaacatcaatatttattttctcattctatcattcaggcaattccaaactgcgactttaagaacacaaaatatacacatttcacgtgagtaaaaataaaatgaagtacaataatataaagctttggtaggtcacaagggaagagggcttggaaagtggtcagcgtgcttggcagggtaccttagtggcagctgtgaaaacataaactgggggcaggcgcggtggctcacgcctataattccagcagtttgggaggctgaggtgggtggatcacctgagctcaggagttcgagaccagcctgactaacatggtgaaaccccacctccactaaaaatacaaaaattaagccaggcacagtggctcacgcctgtaatcccagcactttgggaggctgaggcaggtggatcacctaaggtcaggagttcaagaccagcctgggcaactatgtctctactaaaaatacaaaaattagctggacgcggtggcgcatgcatgtaatcccagctactcgggaggctgaggtaggagaatcgcttgagcctaggaggcagaggttgcagtgagacaagattataccattgcactccagcctgggggacagagcgagactccgtctgaaaaaaaaaaaaaaaaaagaaaacataaattaggtatattctaccacccagcagttccactggtaggtatctcagagtcagaaagctggataaacgaacatcaatccatacctacgtagatagatggtctttttcttttttctttttttttgagacagagtcttgcactgtcacccaggctggagtgcagtggtgcgatctcagctcacagcaagctccgcctcccaggttcacgccattctcctgcctcagcctccccagtagctgggactacaggtgtctgccaccacgcccagctaattttttgtacttttagtagagacagggtttcactatgttagccaggatggtctcgagctcctgacctcgtgatccgcccgcctcagcctcccagagtgctgggattacaggcgtgagccaccgcgcctggccaatagatggtcttaaaggccagcagagagaagagaaaccaccagtgaatgacgaaaattattacaatagatcacttaatagaaaaactggaaacccaaaggtaacggaaggctactttcaaagcactgaaggaaaaaatctatcagtcacactattgttcaagagcaaaggtgagataaagactgtttcagaggctggatgtggtggctcatacctgtactctcaacactttggtaggccaaggtggatgggtcacttgagcccaagagtctgagaccagtctgggcaacatggtgaaaccccgtccctacaaaagatacaaaaattagcagggtgtggtggcatgcgcctgttagtcccaactacttgggaagctgaagtaggagaattgcttgagctccaggggttgaggctgcggtgagctatgattcactccagcctggacaacagtgagactgtctcaaaaaaaaaaaaaattcagaaaagcaaaagcagagttcatttccaaggatactagccagaggaattagaaaatgttgttcttcaaaaaaaccccaagaacgaaggaaggaaaaacaaaggaattgatgaatatgatgaatgtgggctaggtgtggtgactcacacctgtaatcccagcactttgggaggtcgaggtggggggatcacttgagcccaggcatttatgactagtctgggcaacacagtgagatgtcatctcttaaaaaaaaaaaactgatgaatgtatatttaaatcaaatccaatgctgaccacatgaaatgcagaaatcacgacttggaattaatgggatagactaatatactagacaacagtggccaatgaggtgggaatggggcaacagaatcaagtgttctgaagtcctcaagtttctcatgattcatgttagacctgctcaagtcagaattaaaagaataaatgtagtataaaacatctaagcccacagagcagtagtttttaaccagggatgtttctacttccagaagatacttggcaatatctggagatgattttggttgtcagtctgactagggggcagatgttcctaggagccacggatgctgctaaatatcctataatgcacaggatggacttccacaacacaaaatgatccagccccaaatgtccatagtactgaagttgaaaaacattgtagagggaggtcagaattaaaaacaaaaacaaacagacaaaaaacccgatcaatccagaaagctggtaaggggtaaaaaacagcacaaaaaggacagactaaatacaaagtgtaaagtaaggtatcaacaattacaataaatataaatggccttgatgggtcagataaagactgcattagactgtattaaaaaacatgtttgtaacaggtattcctaaagcaaaaggacataaaagccaaaagtgaaaggatgggacaggtgaatgccaaacaaagaagggttttgtggctctttacaaaccaaagaaaaatttcaagtgaggatcacagggcaatgtaacagtaacaacatgcctcaaaacacagagcaggccgggcgcggtggctcatgcctgtaatcccagcactttggtaggctgaggcaggcggatcacttgaggtcaggagttcaagaccagcctggccaacatggtaaaaccatgtctctacaaaaacacaaaaattagcgaggcatggtggcacatgcctgtaatcccagctactccaggaggctgaagcagaagaattgcttgaatctgggagacagaggttgcagtgagccaagattgacccactgaactccagcctgggcaacagagcaaaactccatctcaaaaaacaaacaaacaaacaatcaacaacaaaaaaacacagagcaaagccagctaggtttgtaggaagaaaacagcaaatctaaggatagtgggaaattttatttatctgttttttgaggtttttttttctgatcaagtagctcagattatatttaaattttaaaaaatgttttaatgtaattgtttaatttttataatgggggtctcagtatgttgcccaggctggcctcaaactccagagcacaagcgatcctcctgcctcagcttcatgagtagctgggactataggcacatgccactgcaaccagccatagtgggaggttttattttatctatttaatttttttttttgagacggagtctcactcttgtcgccaaggctagagtgcagtggcacgatctcggctcattgcaacctctacctcccgggttcaagcagttctcctgcctcagcctcccgagatgggattacaggtgcccaccactacgccagctaatttttgtatttttagtagagacaggtttcaccatgttgaccaggctggtctcgcactcctggcctcaggtgatctgcctgcttcggccccacaaagtgctgggattataggcatgagccactgcacccggcaggtgggaggttttaatgaacctcttttagaaatgaaaacgcagaagaatggaaaagagttatgcaggacagaatgtagttacccaatctgatcacacagctggatgaaaatctacgtacaaattaaaataaaatgctttctttctaagcacaagtggaatatttgctaacactgactaggtcaaagaaaaagttcaacaaagcccagactacagcctcttgacttcgaggcagcaagttaaaagccagtaacagaaagaaaaccaaatataataaaacagcgagtaaagcaaactcctatttatttggaaaaataaaaacttgtttctcagtaattgacagatcaaagagaaaacctgatagaaattacaaaacacctagaacaggccacgcacggtggctcatgccttgtaatcccagcactttagggggcagaggcaggtggatcacgaggtcaggagttcaagaccagcctggccaatatagtgaaaccccatctctactaaaaatacaaaaattagccaggcatggtggcgcatgcctgtactcccagctactcgggaggctgaggcaggagaatcgcttgaacctgggaggcagaggttgcagtcagccgagatcatgccactgactccagtctgggtgacagagcgagactccatctcaaaaaaaaaaaagaaaaaaaagaaaaggaaaacacctacaactacacaatgatgaaaacagcacatctcaaaacatgtggcaaatgagaatgcagaatgcagctaatagttcctagattgaaaatgctggtctttaatgcctatattttaaaaagaaggctaggtcaggcatggtggctcacacctgtaatcccagaacttttagaggctgaggcagggatatcacttgaagccaggagtttgaaaccagcctgattatcatagtaagactgtgtctctatgaaagaaaaaaaaagttagctgggtgtggtggtgtaactcgcctttagtcccaggtagttgggaagctgaggcaggaatatcccttgagcccagaagttcaggagttcaaggctgcagtgagtcatgatcgcatcactgcactccagcctgggtgacagagtaagactgtctccaaaaaaaaaaaaaaaaaaaaaaaagggactaaagatgaagttactgtgggtcctgaagctacagatggcagcaagtcaacagccatggtggtctccaaggctgcccacagattttctttaggccatcgctgatgggttctatgtatcattgaaatgaatggcaataacacattctgggatgtgggtaacgcatggtgccctcagaatggtcttgttggcttcactgtatgactgatgatcctccaacaataaacaacctactgcttgtaaactcattggacaagccataaactcaaagtgatatgtaccttattccaccactagaaagaagattcaggagtaagtcccaccttcaacaccttgtaagtacagataaaaaaaaaaaaaaaacagtttaaacatgtaaaaaatgggactttttatgtagttgtacttttagggctcaccattaacttgattataattgactaaaagaaaagaagaccgaagactagtgatctcactgttcaatttacaacttatgggaaagaactatggactaaaccaatgggaggtagaaggaaagtgttaataaaaatcacagcagaggctgggcacggcggctcacacctataatcccagcactttgggaggccgaggcaggtggatcacctgaggtcaggcattcgagaccagcctgatcaacaaggtgacacctcgtctctactaaaagtataaaaattagccaggcatggtggcaggtgcctgtagtcctagctactcgggaggctgagacaggagaatcacttgaacccaggaagcggaggttgcagtgagccgagatcgtgccactgcactctagcctgggtgacagagcaagactgcctcaggggaaaaaaaaaatcgcagcagaaattatggaaattaaaaacaagaaaccagttgagaaaatgaagaaaaccaagtctgtcatttgaaaagacaaatgaaagagaccattaaaaaacagcaagaaaaaggccagacatggtggctcatacctgtaatcccaacactttgggaggctaaggcaggtggactgcttgaggtcaggagtttgagaccaccctgggcaacacagtgagaccccatctctacaaaaaatacaaaaaaaaaaaaaaaaaaaaaaagccaggcgtactggtatgcacctgtggtcccagctacttgggaagctgaggtgggacaatcgcttgagcctgggggtcagaggttgcagtgaacggagagagtgccacttcactccagcctagctgacagagcaagaccctgtctcaataaataaataaaattttttaaaaagcaaaaatgaacacataagtgatattaattgtcagacaggggtttaactaacagtgtaaggttaacaaaatggcaaagttggatttatcctaggaatgtaaggactaggaaacattggaacatctattaacacaattccccatattatcagattaaagtagaagacagcgcccttacaccttatcccaatacattcagaaagtaatatgaaaaaaatctcaccaagactcatgatcaaaatactctcagattcaagtaatagatcctttatctcaaaaattcaaaaagtactttaaggaaacctcagactcctaaggaaaattcttaataattagggtcataggaaattaatgtgaacatcacaccttaaacatcagaaaaaaggaaacatcagaatcatttactttcaagtccaggccaaggccttagacacttgctatgtacacagcattcagcagtgatgtggaggggccagccagtcaggaggaccatgctcccagctgtcacccctggatgctacaaggacccctcccgtggaaagggctcctgaagctgccctgccgcatgacatgtttcctgttctgaatcttctggatagactggggcctggcatggtctgtggccatcctgtgaaaacaagggacttgaaagcacctccccgcacgtttgtgaagggaagatgcacacgtacagttaaaagaaataaaataggctgggtgcggtggctcacacctgtaatcccagcactttgggaggctgaggcaggctgatcacatgaggccaggagtttgagaacagcctggcagacacggccaaaccccatctccagtaaatatacaaaaattagctaggcatggtggtgcacatctgtaatcccagctactcgggaggctgaggcacaagaatcgcttaaacctaggaggcggaggagacagagcaagactgtctcaaaatttaaaaaaaagaaaaaagaaaaaaagaaaataaaagatgagataaatcagacatatacagggtgatatcatttatggaatttcttcagacacacaaaatattctcttagaaataaaaatataacgatgccttggcaagacaccaaccaaggctgtgattacgtctctcttgggggtagggaggctaactcgccttgaggaacaaaaggaatgtccatttcatccataacagatacttcctttgttgaaataaaacttaaacaccaccaagaaagtgaaaacacaacccaccaaatgggagaaaatatttatattatgtgtatctagaatatcgaaaactcttacatttcaataataaaaagacaaaaacccaatttttagaaatgggcgaaggatcttgtcttagtctgggctgctacaacaaatagactgggtggcttaaacaacagaaatctatttctcacagttctggaggctaggaaatccaaaatcagtgtgtcagcatgattggttctggtgagggtcctcttcctggtttgcagatggccaccttctcagtgtgccttcacagggtacagcaggaagcaggagctcctgagagctctcctgtctcctcttataagagcactgatttcattcaaaaaggttctaccctcgtgacctaattacctcccacaggcctcatctccaaataccatcacagtggggataaggcatcaacatacaaattttgaggggacactacattcaccccataggagttctgaatagatatttccccaaagaagtcatacaaatggccaatgagcacatgaaatgatgatcaatatcattaggtattcgggaaatgctgatcaaaaccacagtgagatgccactttacactcactagtatgttcaatatttaaaaacaaacaaaaacaataacaagtattggcaaggatatggaaaaactggaaacttttcactgccggtgcaaatataaaacagtgtagctaatttggaaaccagtctgatgattctcaaaaaggaaaatatggagctgtcatatgatccagctattccactgctacggtttggatatggtttgtccacaccaaatctcatgctgaaatttaatccctactgtggtggtgctggggcatgcagcctaccaggaggggtttgggtcatggaggtggaacccgcatgaatggcttggtgctgttctcacagtagtgagttcttgctctcatgagactggatcggttctgggggaaatgaattagtgcccccagaattgtattgattctttacatagacttagggctttagaatttaaagaattatatggatatttaatattaccagtaaatttagagtacactgcaaaacagattataaaccgtgcacattacataaaaatttactcaaaatggatcagcctaaacataaaagctacaactataaaactctttcttttttttttttttttgagacagagtcttgctcttttgctaaggctggtgtgcagtggcgtgatctcggctcactgcaagctccgtctcccgggttcacgccattctcctgcctcagcctcccgagtagctgggactacaggtgcccgccaccacacccagctgattttttgtacattttttagtagagatggggtttcaccatgttggccaggatggtctcgatctcctgacctcgtgatccgcccaccccggcctcccaaagcgctgggattacaggcgtgaccaccgcgcccagccctttttttctttcttaagagacagggtctcactctcttgtccagcctagactgcaaggtgcaatcaaggctcaacacagcctcaatctcctgggctcaagtgatcctcccacctcagcttcctgagtagctgggaccacagttgcacaccatcacacataattttttttttttttttgagttagaatctcactctgtctcaggctggagtacagtggcatgatctcagctcactgcaacctccacctcctgtgctcaagcgattctcttgccttggcctcttaagtggcacatgcccccatgcctggctaatttttctatttttagtagacagggtttcaccatgttggccaggctggtcctaaactcctaacctcaagggatctgcatgtctcagcctcgcaaagtgctgggattacagacgtgagccaccacacccagcctaaatttttcttttttttttggtagagatgaggtctcactatatgggccaggctggtcttgaactcctgggctcaagcaatcctcccacctcagccttccaaagtgctgggattacagttgtgagccaccacgcctggcttaacactctttttttttttctgagacagagtctcgctgtgttgcccagactgaagtgcagtggagcgatctcagctcactgcaacctcctcctcccgggttcaagtgattctcctgactcagtctcccgagtacctgggattacaggcatgtgccaccatgcctaatttttgtattttcagtagagacggggtttctccatgttggtgaggctagtcttgaactcctgacctaaggtgatcagcctgccttggcctcccaaagtgctgcgattacaggcataagccactgtgcccggcctggcctaatgctcttggccaggtgcagtggttcatgcctgtaatcccagcactttgggtggctgaggcaggtggatcatttgagctcaggaattcaagaccagcctgggtaacacggtgaaaccccatctctactaaaaatacaaaaaattagccaggcatggtggcatgcacctgtagtcccagctactcggaagactgaggcaggagaatcgcttgaacccaagaggcggaggttgcagtgagccgagatcatgccattgcactccagcctgggcaacaagagcgaacctccatctcaaaaaaaaaaaaaacaaattagccgggtatggtggccctcgcctgtaatcccagctactagggaggctgaggcaggagaattgcttgaacctgggaagcagtttgcagtgagccctgatcgtgccactgtactccagctcgggtgacagagcaagactacatctcaaaaataaaataaaataaaaaaagacccatgctataacatgaaacattttcctaagtctaacaagccacatacaaaagaccacatactgcaggctatttatatgaaatgtccataacaggcaaatctataagacagaaagtagattagagattacctagggctgggaaagatgggggagtgactgctaatggtatgggttttctttttcaggggtgatgaaaacattcgaagattgactgtggcaatggatatacaagctagttaatataataaaaaacaatgaattgtacacttaaaagggtaaattgtatgctatgtgaattatatctcaataaagctgtttaaaagagtaagtatgtgtcgagtctgtaagggtcagaaccactagtctagaccccatctgccacatttctggtattttaggactttataaaggaaataacagtccttgcagggatgtgctgagctcatgtagacttccattccctggtactcacctctgaaaggcagagggatccattcaggccaggtgtgtggatacttgacatcgatggttgctggacattagccatttatgcccatccacacggctccagccatctctgtgggacacccataataatgtttactttacttgttcacaactcattaacaaaaataaatcatttaccaactttaatcccatcctgacaaagtcagccatgtgattacaagtgtgataaagagtctgactccattttggatggttgctgacagctttcaagccccaacccctttctccttctccctctcatctgggcaagccaacaagaaagtctgggagtttcctccttggtgccagcaggaagttcaaactatgcaagccccaaccccaaccccattacctaatcacagtgaaagcccagccacagccgggtgcactggataacacctgtaataccagcactttgggaggttgaggcaggaggatcacttgagcctaggagttcaaggccagcttagacaatgtagtgaaatgcctttagccaggcgtgatggtgcatacctgaagtcccagctacttggtagcccaggagctcaaggctgcagtgagctgtgatcgtgccactgcactccagcctgggtgagacagcaagaccctatctcaaaaaaaagaaaacaaaaattaacaaaaattatatagtatctttgtggtgaaaacttgaaaaagtttactcaagacctgagagggcatttgagtaagagaggagctagaccaggtacacagatgaaagggctgggtactgaaaccaggacaactctcactagacctgtaaaagcaatgccttccaagcaaatctctggaataattttactgatgcgtgacaaaattcacactgaagaagacagcttcctgaaatatccatgacaactccttaaaaaacaaaaagaagagaggaaaaagagctaggagtagttgttttgccaaagtcaaggctcctccttaaagttccagtaagcaagcaacccagtgaaggtacaggaaggacagagccccaaacagacttggaggcatttaataatttaaaaggtgataaaggtggcctcacacattagcaaaagtaagtatatctcgtgctgtcttttcagatggaaaaataattacaattccaaattcactcacgctcacacacaggcttataagacctaaatagtatgtgagaaaaaatttttttgaatgattagaaataatagaactaggctgggcgcagtggctcacacttataatcccaggactttgggaggccgaggcaagtggatcacccgaggtcaggagttcgagaccagcctggccaacatagtgaaaccctgtctctactagaaatacaaaaattagccaggcgtggtggcaggcgcccgtaatctcagctactcgggaggctgagggagaagaattgctggaacccgggaggcagaggttgcagtgagccgagattgcaccatttcactccagcccgggcaacaacagcgagactcagtctcaaaaaataaataaataaataaatatagaactacaagaatatctttgagttatcagagtagaaaaaaattgtgggtttttttgttgttgttattttttatttttttatttttcagatggagtcttgctctgttgcccaggctggagtgcagtggcgtgatctcaactcactgcaacctccgcctcctgggttcaagcaattctcttgcctcagcctcctgagtagccaggactacaggtacctgccaccacacgcagctaattttacatctatatctatctatctatctatctatctatctatatatatatatatattttttttttgagacggagtctcgctctgtagctgggctggagtgcagtggcgcgatctcggctcactgcaacctccgcttcctgggttcaagtgactctcgtgcctcagcctcccgagtagttgggattacaggcacgcgtcaccacactcggctaattgtttatatttttaatagagatggggtttcaccaagtcggccaggctgatcttgaactcctgacctcaggtgatctgcctgcctcgacctcccaaaatgctaggattacaggcatgagccatggcgcccagccaagaatttttttttttttttttttttttaaagagacagagtcttgctttgatgctcaggcttgaatgcagtagtatgatcatggctcactgtaatcttgaatgcctgggctcaggagccatgaccataggagtatgccatcacacctggataattttttttctttttttttttttttttgatacagagttttgatctgtcacccaggctggagtgcagtggtgcgatctctgctcactgcaagctctgcctcccgggttcacgccattctcctgcctcagcctcccgagtagctgggacttcaggtgcctgccaccatgcctggctaattttttgtatttttagtacagacggggtttcaccatgttagccaagatggtctcgatctcctgacctcgtgacccgcccgcctcggcctcccaaagtgctggaattacaggcgtgagccaccgcgcctggccattttttttttttaaatgttttgtagagattgggtctcactgtgttgcccaggctggtttcaaactcctgagctcaagtgatcctccagcctcagattcccaaagtgctgggattaaggcgtgagccaccactacatcaagccaaaaaaaatttcttttttcttccttttttttttttttttttttttttggagacagtgcctcactctgtcacccaggctggagtgtagtggcatgatctcagctcactgcaacctccgcctcctgggtttaagtgattctcctgcctcagctgcctgagtagcttggattacatgtgcccaccaccatacccagctaatttttatatttttagtagagatggggtttcaccatgtcggccaggctggtgttgaactcctgacctcaagtgatctacccgcctcagcttcccaaggtgctgggattataggcgcgagccactgcgccaagccaaagaatttctcaactcacaaaaggcacaaaacataaagaaaaagatttgaaacatcttactatatcaaaatgagtaatacaccatgaacataagattaaaagaacattcaaagtaccatctctagaatggcttatcaattacagaggggaaaaagcggaggatcctggcagagagcactttaaccacatgacaaaaacctgatcaccaccagcctcacatgcttcctgacacgacacaccaagaagaacatgatgtcacttagacaatgccctgccaaagacgagagtctgaatttaatattgggaatgtcaactgaacatcaagtgacaatctacacaaccaccagctgggtcttttaaaaatatatcaatttcatgaaaaaaaaaaaaaaagaaaggagagtgccattcaaggttgaggaagactaaaataacatgacaagtcaatgtaacacaggatcctggattggatcctggatcaaaacaaatacccaaaaaccatacaaactgtatcagctgcatacaaactatatcagacaggaattctgtatcaataataaagtatctggggccaggcgcagtggctcacacctgtaatcccagcactgtaggaggccaaggtgggcagatcacttgaagtcaggagttcaagaccagcctggccaacatggcggaaccccgtctctactaaaaatacaaatattagctgggcatagtggcacacacctgtaattccagctacttgggaggctgaggcaggaaaaccacttgagcctgggaagtagaggttgcagtgagccgagatcgctccactgcactctaccctgggtgacggagtaagattccatctttaaaaaaaaaaagtaggtggtacctggtcaagagaggaaggtagtccctctccctctccccctccccctctccctctccccacggtctccctctccctctctttccacggtctccctctgatgccgagccgaagctggacggtactgctgccatctcggctcactgcaacctccctgcctgattctcccgcctcagcctgccgagtgcctgcaattgcaggcacgcgccgccacgcctgactggttttcgtatttttttggtggagacggggtttcgctgtgttggccaggctggtctccagctcctaaccacgagtgatccgccagcctcggcctcccgaggtgccgggattgcagacggagtctggttcactcagtgctcaatggtgcccaggctggagtgcagtggcgtgatcttggcttgctacaacctccacctcccagccacctgccttggcctcccaaagtgccgagagtgcagcctctgcccggccgccaccctgtctgggaagtgaggagcatctctgcctggccgcccatcatctgggacgtgaggagcccctctgcctggctgcccagtctggaaagtgaggagcgtctctgcccggccgccatcccatctaggaagtgaggagcgtctctgcccggccgcccatcgtctgagatgtggggagcgcctctgccccgccgccccatctgggatgtgaggagcgcctctgcccggccgcgaccccgtctgggaggtgaggagcgtctctgcccagccgccccgtctgagaagtgaggagaccctccgcctggcaaccgccccgtctgagaagtgaggagcccctccgccaggcagccgccccgtctgagaagtgaggagcccctccgcccggcagccaccccgtctgggaagtgaggagcgtctccgcctggcagccaccccgtccaggagggaggtggggggccagccccccgcccggccagccgccccgtccgggaggtgaggggcgcctctgcccagccgcccctactgggaagtgaggagcccctctgcccggccagccgccccgcccgggagggaggtgggggggtcagccccccgcccggccagccgccccgtccgggagggaggtgggggggtcagccctccgcctggccagacgccccgtccaggagggaggtggggggccagccccccgcccggccagccgccctgtctgggagatgaggggcgcctctgcccggctgccccactgggaagtgaggagaccctctgcccggccagccgccccgtccgggagggaggtggggggggtcagcccccccacccggccagccgccccgtccgggaggtgaggggcgcctctgcccagccgcccctactgggaagtgaggagcccctatgcccagccaccaccccgtctgggaggtgtacccaacagctcaatgagaacgggccatgatgacaatggcggttttgtggaatagaaaggggggaaaggtggggaaaagattgagaaatcggatggttgccgtgtctgtgcagaaagtagacatgggagacttttcattttgttctgtactaagaaaaattcttctgccttgggatcctgttgatctgtgaccttacccccaaccctgtgctctctgaaacatgtgctgtgtccactcagggttaaatggattaagggcggtgcaagatgtgctttgttaaacagatgcttgaaggcagcatgctccttaagagtcatcaccactccctaatctcaagtacccagggacacaaacactgcgcggaaggccgcagggtcctctgcctaggaaaaccagagacctttgttcacttatttatctgctgacctcccctccactattgtcctatgaccctgccaaatccccctctgcgagaaacacccaagaatgatcaattaaaaaaaaaaaaaaaaaaagagaggaaggtaaaaaatttccctgtttcttcttttccaggttcagattggcaggaaaaaaaaattacaaataaaaaacaattagttttttgaaaaaaaaaaagtatacttgggtgtgataataacactagttttgtttaaatgttcaaatgttctttttggctgggtgtggtggctcacacctgtaatcccaccactttgggaggccaaggcaggaggactgcttaagaccaggagttcaagaacagtctgggcaacatagtgagatctcatctctataaaaaatacaaaattaaaaaataagaacgttacttttcttatgagatcctggctgaagtatttcagagtgaggtatgatatctataacatacttccagtaactcagccaaaaaaactaagtgtatgtaaatatatgtctgtatcacacctgcctctgcaacacctgctgtgtgtacaagtgtgtgtaaaatataaaaagaaaaccctatgtcagaggcgtttgaaccaaagcaaacctccatcttaaatggggactgggtaaaataaggctgaaacctactgggctgcatttccagacagttaaggcattctaggtcataggataacacaggagatttgcacaagatacaggtcataaagaccttgttgataaaacagcttgcagtaaaggtggctaaaacccaccaaaaccaagatggcaacgagagtgacctctggtcctgctcccactagcaccatgacagtttacaaatgtcatggaaacatcaggaagttaccctatatggcctaaaaatggtaggcatgaataatccaccccttgtttagcatataatcaagaaataaccataaaaatgggcgaccagcagttcttggggctgctctatctatggagtagccatttttttattcctttactttcttaataagcttgctttcactttactctatggactcgccctgaattttctttcccaagatataagaaccctctgttgggttatagctcgggaccccctttctggtaacacctatgcatgtgtctcaggcagggagaagataaagataaagctaatgtggcaaaaagtgttaataattttagaatctggatggttttagaagtgttaaactattcctgcaacttctatgcaaatgcggaacttttcaaaatgaaaagttgggtgaagagagaggtaaacaagcagtagaatggaggaaagtcacttgctgtgggaaaaaagaaaaaacagacaaaaactgggtattcaaaacgtacttcaacaagcccaagttcctatagccaaattttttaacttggcaaaaaataaaggaccttttcaggctgatggtaattttaataaaggtttaggttgcatttgtcaaaattcatcaatggtacagggaatatctgtgcatttcactgaaagtcaattttggctcaaaaaatttaaaaaagcactactgaactctaattcatggtaagcatagtgaggtgtttgagggagaagtgttgtgatatctgcaacttactttgaaatgtttccaaaaataggtggattaatgaatggctgaaaggatggacagaaggaaagataagggatacagtaagttcagcagacgttaaccgggtcgttcactgcacaagtctttcagcttctctatctaaaccaacattttatgtcataaaatattgagactggaagactgcacaaaggaaatatgccactaaaccaagggaaaagacagcaaaatggtcactaaacacgtgcaaaaatgcggccctcactgagaattgcagtaaaacatgattttgcaaatatcaaatggaaaaacacacaggtgatctaacaccttcgagactcaaggggaagcggctcagcccactggctcacggccgccaattcagccggaggccgacccaagcctacactgcccctcacacctgacagaaaagctgcagactcgggggttacccccggagacggaccaggacacccagcaggcgtggcaaaacagtctctatgggagggcgggctagagatgcgagcgcggaactcacgggtgacgctaaggaaagagcgggggcgtccagaccagccccggagcgacctcgtcctcagaggagtgaccccaatcgccacggagcgtccccacccaccaggagaactacgcccctggccagaccctcgccctagcgggcccgacatgcccaccacccaggtgaaacccacccgcggacgcgcccctcgccgccccacaaggacccggcggacctccacccgccaagacttccctccgcaggaaacggaggcagcgcagggctcagggatgcgtcggcacttacggttggcggccggcggcagccatgttccgggcgattgcgcttgcgcggctgccgggacaaggatgtgcgcgtgcgcggagtccccgagcttcccccgcccaacgctggggcggccgcgggtaccgggttattcattaccctggcgtggacttgcctcggggcggacgcgcaggcatttactttctcctatggtctcctctgatttttaacccgatgctatcattcttttgttatagagccttccttttatttactgcataatttcctaaaatatttctttatctataatctttttttgagataataatgttaaaattcagaataagtacactcattattcattggcaatataattatttactgggtgcgtggctcacgcctgtaatcccagcattttgggaggcctaatttgttaaaatgactagatctaagaaatgtaaacaaagccagtaactttcctctgtagtaacaatagccggttgaaaatgaaaactacacattttcattctttcagtggttctcttaaactttagcatggggaagcctaaatatttactgacagggaagagagaaactgtggtatgtgcaacggagcaatagggggtggttaaaacaaacggactgggctcacctaaggtcaggagtttgagaccagcctggccaacatggtgaaaccccgtctccactaaaaatacaaaaattagctaggcgtggtggcaggcgcctgtaatcccagctcctcgggaggctgaggcaagagaatcacttgaacctgggaggcggaggttgcagtgagctgagatcgtaccatcacactccagcctgggggacaagagggagacttcgtctcaaaaaaaaaaaaaaaaaaaaggactaacttatatacaagatagacagttctccaaaaacagttcgaaaagtaaactgtgcacttatccacatgatacaacttacctggaaataaaagacacaaaatctatatgttatacagagattgatacataagtagtaaagtaacaataacatggaccagatagattgtccaacctcaagaaagtggcaactgaggggaaagagttggggaggagacaaaggagacctcagttacacctgtgatgcttgataggaaaaaacaaatcaaaacctgaaaatctgactacatgttaacacaggtaaaatctcgatgatacatgggtgtcatctttattatttatagattattctattactctccgaacctctccgcaggttgaaatacttcacaattttgaaatgaaaattagaaaaaaaattctaagccataatagtgattaaattgtcactcacaatagtgatggttggagcaacttggaaatcaattagcaaaagcaataaaggatcttcatgaagaaaatacaaaaacctcattaacagacctgaagttaagttcagaacacactgacatattattcctgaatggaaagtatttttttaatttctccatgaaggccgtatcagaccaggcacagtggctcatgcctgtaattccaactctttgggaagccgggctggggggatcacctgaggtcaggagttcaagatgagcctggccaacatggtgaaaccccatctctaaaaatataaaaattggctgggcacagtggctcatgcctgcaatcctagtactcggtctcaaaaaaaaaaaaaaaatcttcacaaaactactaaacaaaagtatagcaattccaattcaaagactccccccgcccccagctcacagaataaaacaacttaaagatcatatggagaaaagtccaacagtatctggttaaaagaacagtcggagaccggacgcggtggctcacaactgtaatcccagcactttgggaggccgaggcaggtggatcacttgaggtcaggaattcaagaccagcctggcaaacattgtgaaacctgtctctactaaaaatacaaaaattagccgggggtggtggcgggtgcctataatcctagctactccggaggctgaggcaggagaattgcctgaatcctggaggcggaggttgcagtgagctgagatcgtgccactgcactccagcctgggtgacagctatactctcgtctcaaaaaaaaaagtcaggcaccctttattagatactaaaatgtaccatattaagcagatgggctcaaataggcactaatacagacacaaatatcagaagaatagaagagtatgcaagaagagatgagtaaaagtaataatctagtaataaagttaacaataaagcataacatcattaataataacaagggtgttttttccattcagtggcaaagagaaatccttagtgctaagtactgtgctggcacaagtgtatattcttttttgtattttttgagactgagtctcactctgtcccccaggctggagtgcagtgacaagatctcagctcactgcaacctccaccttccaggttcaagtgaatctcctgcctcagcctccagagtagctgggattacatgcgcacaccaccacacccggctaatttttgtatttttagtagagacagggtttcaccttgttggccaggctggtctcaaactcctgacctcaggtgatccacccacctcagcctcccaaagtgctgggatgacaggcgtgagccactgcgcctggccacaagtgtatattcttgtaggtcacatgtaggcaatctttttctgtgaaaagcccaataataaatattttcagctttgcagaccataaggtctctgccatgactacccaactcttccagatagcagcatagataatactaaacaaacaagtgtgactgcattccaataaaactttacagaaacagaaggcccactgaggccattgtttgccaatccctgttcaggaattatctgtttgttcttggggtaggagactttctacatcaagataagcatcccagaagtcatttacaaaatggcactttttttttctcttagaaatggggtcttgctttgctgtccaggatgtagtccagtggcatgatcatagcccactgcagccttgacctcctgggctcaagcaatcctcccatctcgacctccccagttgctgggactacaggtgtacaccaccatgcctggctaatttttttagtacagatggggtctcactattttacccaggctgctctcaaactccagggctcaagtaatcctcagcctcccaaagtgctggcgttacaggcgtgatccaccctgcctggccaacatatgtgatttttttttttttttgagacagtcttgctctatcgcccaggctggggtgcagtggcgtgatctcagctcactgcagcctccaaactctgcatccccggttcaagcgattctcctgtttcagcctcccaagtagcagggattacaggcacgtgccaccacgcgcggctaatttttgtatttttagtagagacggggtttcaccatgttggccaggctggtctacaacccctgagctcaggcaatccgcccgcttgggccacccaaagtgccgggattacaggcgtcagccacagctgtaacttatttaatggggcactcaaggccttttgctgctggctcaacatccctttcaggccttcactgacctatgccacacagcacttgcgcccagggataaagagccggatcagcttctgctcaccccagtcctcttgccagaaaggccctctggcctttgtccagttgctggacgctgcctcttctttctggttggtctcctcctccaggaggcattcgcgaacgccccagtggagccacacggtccatgcctcttccacttatttccccagggctcacattccacaactactaaatcaacaccgacacactcataagcagccccttcctcgtcctttttttccttctgagctcgggaacgtctgctgggggtgagggggactcgcagaccacccccccccccgccccaggcggaggtcgggggccgtcacctggccaggtgtccggggaacggctcgggcggctgacaccgcagtccgcgagaggcgaggaggatccttggactgtgggcaggatcgcaggcagcggaggccctgcccggaaggcgggatctggggacgatccccattcctcccagccgcagacgcggagcccacaggagtccccgcagccctagcccgtgcacccacggcggagccgaggccgcgactccgggcctgttggctggaacccgcagccgtgtctcgggccgccccggtagcggccacccctgagagcactcggccccgttctatcccgcagtggtttggggagtgcaggtcatcactcccacccgccaaggcggacgccggaccctccattgcgcatgagcgcccactgcggcgccgttgctgcgcatgagtgtgcttccaccgcctacatctcccagaaaaccccgcggcgcggcgctccaccgcttccgccctcgggttgcgttagccgcgacgatggcgccccccagtggcagcagggaggctgtgggggtgctgggcgttgcggtgtgcaggttttctgggaggatacctggcgccgaccttgaagggaccccaacgtgagagggaaagacgcccgtgatgccaaggcttgggcagcggacagccaaaatcctgaaaccccgcggtgctccctgtgattcactttccagaggcccctcagtgccccgacgctggcccggagggcggtcgctgactgtcttgagactgaagctcactttcggatcctgggcgttcttgccaggttttttttattaatacagagaaaaccagtggctttgtgacagttagttttgaaactccctgaggagggccgagcgcagtggctcacgcctgtaatcctagcgctttgggaggccgaggtgggcggatctcctgaggtcaggagttcaagactagcctggccaacatggtgaaaccccgtctactaaaaatacaaaaaattagccgggcgtggtggcgggcacctgtaatcccagctactcaggaaggctgaggcaagagaatcgcttgaacccgggaggcggaggttgcggtgagcctagatcgtgccattgcactccagcctgggcaacaagagcgaaactcagtctcaaaagaaagggagaaagggagaaagagagagaggaagggaggaaggaaggaaggaagaaaagagaaagaaagagtccctgaggagcaagcaattccctcagccaaagaggtaagaactgcaaaattgataaatattgcatttatcttacccccacattttattaagaacattttcaaacatgcagaaaatttgaaacgattgtgtgggcctggcacagtggctcacgcctgtactttctgcactttgggaggctgggaagggagggtcgcttgagctcaggagtttgagaccagtctgggcaacatagtgagaactcgtctctacaaaaaaatttaaaaaattaaccgggcttcgtggcgcgcgcctgtagtcccagctactcaggagtctgaggcgggaggatcccttgagcccggggatgttgaggaatgattgtaccactgcactccagcctggacgacagagcgagaccctgtctcacaagaaaaaaaaaattgtgtgaacacccacgtacccaggccctgggttagataattaatattcgacaatatgtgcttgatccaagtatccattattgcatttatttcgatagtaattaaacaggagattgagtgactatgggccagccgtggaggctcatgcttgtaatctcacactttgagaggctgaggcaggagaatcactggagcacaggagatcaagcctgcagtgagctgtgattgcacttcagcccaggtgacacagtgagaccctgtctcacaagaaaaaaataaaaatgagtgactaatggattcaagccaattagcatctgcttattagcacatatgctttctagttacataaactgagtcaaaagatttcatttctctaaaattttgtcatttaaccatcagagtagagtataacatacagggatgtatgaggactgtattagctaatacctgtgtgctctgcatggtaaaccttcaatgcaaatccactgtttaattactgaagcacatttcggaagaactgctacaagtacaattcctagatgctagcgagaatggcataaatatttaaaatagttttagttatatattatgaaatttcctttcatacgtcttctaccatcagtgtgagaaggtcaccgccacccacgttcacccagcagatactcatgttctctaagctttgcatgtctctgttgttttctgttgttgtttgtttgtttaagacggagtcttgctctgctgcccaggctggagtgcagtggcactgagaggtgacagcgtgctggcagccctcgctcgctcttggtgcctccttagcctcggcgtatgctctggccatgctcgggtagcccttcagcctgccactgcgctgtggagcccctgtctgggctggttgaggccggagcctgctccctcagcttgccgggaggtgtggagggaggaggcgcgggcgggaacctgggctgcgcgcgctgcgcttgcgggccagctagagttccggatgggcgtgggctgggcgggccccgcactctgagtggccagccggccccgccagccccgggcagtgaggggcttaccacccgggccagcagctgcggagggtgcgctgggtcccccagcagtgctggcccaccggcgctgcgctcgatttctcgccgggacttagctgcctccccgcgtggcagggctcgggacctgcaggccgccatgcctgagcctccccgcaacccccgccctgggctcctgcgcggccggagcctccccgacgagcgtcgccccctgctccacagcgccaggtcccatcaactgcccaagagctgcggaatgcgggcgcaaggcgcgagactggcaggcagctccacctgcggccctgtgcgggatccactgggtgaagccagctgggctcctgagtctagtagggacttggagaacctttatgtctagctaagggattgtaaatacaccagtcagcactctgtatctagctcaaggtttgtaaacacaccaatcagcactgtgtgtctagctcaggagtttgtggatgcaccaatcagtgctctgtgtttagctaatctagtggggacttggagaatttttgtgtctagctcagggattgtaaatgcaccaatcagcaccctgtcaaaatggaccaatcagctctctgtaaaatggaccaatcagcaggatgtgggtggggccagataagggaataaaagcaggctgcccgagcccccagtggtaacgtgttggggtctgcatccacatggttgaggctttgttgtttggctgtttgcaatatatcttgctgctgcttgctctttgggtccgcattgcatttatgagctgtaacagtcaataccaaggtttgcagcttcactcctaagccaaggagaccatgaagccaccagaaggaagagactccgaacacatccaaacatcagaagaaacaaattccagagacgctgcttttaagaactgtaacactcactgcaagggtctgtgggttcattcttgaagtcagtgagactaagaacccaccatttccagacacgcacaatctcagctcactgcaacctccgcctcctgggttcaagcaatttttttgcctcagcctcccgagtacctgggactataggggcgcatcaccacaccctgctattttttgtatttttagtagagacggagtttcaccatattggccaggttggtctcaaaactcctgacctcgtgatctgcctgcctcggcctcccaaagtgctaggattacaggcgtgagccactgcgcctggcctgttcactgtttttgtgtaacaacttaccacaaaattaccagcttaaaaaccacattttttttcttttttttggagatggagttgtgctctgttgcccaggctggagtgcagtgtcacgatctcggctcactgcgggctccgcctcgtggggaaagccacgtgtatttattatctcagtgttcttgtgagtcaagagtctgggcatagcttaactaggccctctgtttaggatctccagaggtagcaatcaagctgtcagctggcttcattcccatctgtagacttgattatagaagtatctactttcatgttcattcagttggctgaatccatttcttttttttctttcttttttttttttttttatgagacggagtttagctcttgttgcccaggctggagtgcagtggcgcgatctcggttcaccgcaacctctgcctcccaggttcaagcaattctcctgcttcagcctcttgagtagctgggattatagtcatgcaccaccatgcttggctaattttgtatttttagtagagacagggtttctccgtgttgagggtggtctcgaactcctgacgtcaggtgatccacctgcctcggcctccaaaagtgttgggattacaagcctgagccaccgcgccccgcctgaatccatttctttgcagctgtagagctcacagtagcttccttttttcaggccaccagcaagagtctgtaagtaagccttcttatttatttatttatttagacagaacctcacctcgctttgtcattcaggctgtagtgcagtggcgcaatcatactttactacagccttaacttcctgggctcaagcatttctcctgcctcagcatctcaaatagctgggattacaggcatatgcaccaccatgcctggttaatttttttttttttttttttttgagagggagtcttactctgtcgcccaagctggagtgcagtggtgcgatctcggctcactgcaacctctgccccctgggttcaagcgattctcctgcctcagcctcatgagtagctgcgattacaggcgcctgccaccacgccgggctaatttttgtattttagtagagacggggtttcactatgtaggtcaagctggtctcgaactcctgacctcaaatgatctgcctgcttcggcctcccaaagtgctgggattacaggcgtgagccaccgtgcctggccatgcctggctaatttaaaaaaaaattttttttgtttagccaggcttggtggtgtgcacttatagtcccagttacttgggaggctgaggcaggagaatggcgtgaacccgggaagcggagcttgcagtgagccgagattgcgccactgcagtccgcagtccggcctgggcgacagagcgagactccgtctcaaaaaaaaaaaaaaaaaaaaaaaaaaaagatcagtagatactgagaaggagttggaactgcaaaaggtttattggggggcatacctcacacctctattcacaccacatgagctaacatcctgtttgctaaagctagtctcatgtgttttagtcccaagtcaaggaacaggaagaggttctgtgttaattatccactgctttgtaagaaattaccccaaaacatagctgcttaggccaggcacggtggctcaagaccagcctggccaacgtggtgaaaccctgtctctactaaaataaattagcaaagcatggtgttgcgcacctgtaattccagctactcgggaggccagggcaggagaatcatttgaaccccagaagcagcggttgcagtgagccaagattgcaccattgcactccagcctgggcaacagagtgagactgtcacaaaaacaaaaacgggccaggcgccgtggctcacgcctgtaatcccagcactttcggaggccgaggcaggcagatcacgaggtcaggagattgagaccatcctggctaacatagtgaaaccccatctctactaaaaatacaaaaaattagccgggcgtggtgacaggcgcctgtggtcccagctactcagaggctgaggcaggagaatggcgtgaacccgggaggcggagcttgcagtgagccgagatcacgccactgcactccagcctgggcgacagagcgagactccgtctcaaaaacaaaaacaaaaacaaaaacaaaaaacaaaaacatagcagcttacaacaagggaagacaactttttctgtaaaggaccagacagtaaatattttaggtttgggggactatatggtctctgttgcaactgtcaaccttgttgtagcacaacagcagctattgactatacataatacatgggcagagctgtatttcagtaaaacctatggacagttgagtgtggtggctcacacctgtaatcccaacacttttgggggccaaggtgggaggatcacttaaacccaggagttcaagaccagcctgagcaacaaagtgacaccccatccctacaaaaataaaaataaaaaaactttatgggccaggcgcggtggctcacgtctgtaatcctagcactttgggaggccaaggtgggcggatcacgaggtcaggagattgagaccatcccggctaacacggtgaaaccctgtctctactaaaaatacaaaaaattagccaggcgtggtggtgggcgcctgtagtcccagctactcgggaagctgaggcaggagaatggagtgaacccaggaggtggaggttgcagtgagctgagatcgtgccactgcactccagcctgggtgacagagtgagactccgtctcaaacaaacaaacaaacaaacaaaaaacttcatggacactgaaatttgaatttcatataattttcacatcacaaaatataattattcctttattttcaattattaaaagatgtaaaaactacaattaattgatcacaaccagttacagatttctttgttcttctccactcccactgcttcgtttgaccagccaaaacaacaaaaaaaagaattttaaaaaatataaaaactactcttagttcataagccatcccctccccaaaaaggcaacagacgggaccagacctggaaactatagtttgctgactcctagcagtaacaaattaccacagatttagtggcttaaaacaaaataaagttattatcttatagttctggaggtcagaaatccaaaatgggttggctttcctttgggaggcatgagtggagaatacatgccttccattttccagcttctaaaggacacttacattgctaggtctatggccctgagtcactccaacctctgcttccatcatcaaaactcgttttctgattctgactcttctatcttcctcttccacatttaagtatccttgtgaatacactgggcccactcagataatccaggataatctctgtatctcaagattcctaatttattcacatctgtaaaaattcttttgccatgtgaagtaacattcacgaggttctagggatgaggatgtggacatcttttggaaaccattactgagctcactacacagtccaagaaggcctctctgaggaggtcaatgttaatctgacttctcaagtaaaagaaggagccaacatactgaggaagagcattttggtagaaggagagcactagcaaaggctctgaggtggagagaatttggtacaatcaagaaaccagccaggcacagtgagtggctcatgcctgtaatcccagcactttgggaggtcgaggccgacggatcacttgaggtcaggagtttgagacccgcctggccagtatggtgaaacccatctctactaaaaatacaaaaattagctgggcatggtggcgcgtgcctgtaatcccagccacctgggaggctgaggcacgagaattgcttgaccccaggaggtggaggttgcagtgagccaagatcacgccattgcactccagcctgggtgacagcgagactcgttccccaaggaaaaaaaaaaaacaatagcaggcagtgaagacagaatggatgggcaaggggagagagcagaagagtcaggggaaatctggctgacatgtgccaggccttgtgcaccttgattaggagtttgggcttcaccctgaaggagacaggaaaccagaaggggtggagttaacctcgggagtgacatgatctaatttgcaccattagaagggcactgcctgatgtgtgggggaagatctccagcaggcatttagtcacaggctttggaaattcagaagctgagggttagtgatctcgacttggaagtcatcaacataacagtcgaatggtgagggatacaagtcacctcaaacaattggccaagaaacagtcacggtgatgccatgctaggtactgttgccaaggaaattagcaaacagatttggaatctgcctttatgtagcaatcagcatagtgaatgtggatgttctacaaaaaagcataaatatttgagagcaatgagaagtcactcgttgaatttaagcaagagaattaaatgatctagtttacattttaagagagacagggtcgggagaggggggagggatagcattaggagatatacctaatgttaaatgacaagttaatgggtgcagcacaccaacgtggcacatgtgtacatatgtaactaacctgcacgttgtgcacatgtaccctaaaacttaaagtatatataaataaaaataataaaaaaaataaataaataaataaaagagacagggtcttgctgtgtcacccaggctggtgtgcagtggtgcaatcatagcttgctgcaaccttggaatcctgggctcaagaaatccccccacctcagccttccaagtagccgaaatcataagtgcacaccaccacacccggctaattaaaaaaaaactttttttgtagagacgggggtctcactgtgttgtccaggctggtctcgaacttctgaactcaagtgatcttcctgccttggcctcccaaagtgctggtattacaagggtgagccaccacacctggcctgatttccatgtttgaacggttgcactggttgagtgttgggatggtgtcatgaacagaagaggagatgatgatgaaagcactactgtgtagttcagtcaagaagtgtcatgacttggaaccggatgagtcaatggaagtaaaaaggggatcatttcaatgtatgtttaaggtgggctcagaatttggtgattgattcaaaatggaagtggaagggtccatggctactggcatgagcaactgtgatgcaatccatggacaggagaaacctgggagaagaggaggtagagcatgagagtagaactcagtactgacaaggtatggttgtaaaatgaatagacactcccagcaggcagtatgaatatggtgaaatatgtccatgctcagaaaagaatctggaatgaagctacaaattgtgattcatcaatgttcagatggtgtttgaagccagcagaataaaacagaccatactggtggatgagagaagagggctcaggacaagcccccaaagcactggggtccagaagagcatcttgaaaacagcgtgaggagactgggcgcggtggctcacgcctgtaatcccagcactttgggacgctgaggctggtggatcacgaggttgggagatcgagaccatcctggctaacatggtgaaatcccgtctctactaaaaatacaaaaaattagctgggcatggtggcgggcgcctgtagtcccagctactcaggaggctgaggcaggagaatggcgtgaacccaggaggcagagcttgcagtgagccaagatcgtgccactgcactccagcctgggcgacagagcgagactccgtctcaaaagaaaaaaaaaaaaaaagaaagaaagaaaaagaaaagagagtgagaaatgactactagcagagattgatctattttcctatcagccacctggagagactgggcttattcttatttgctcagtcgctcctggcaagacagatttggaaacaaatcaacatgctttcgatgtgcttaataccagcattttctctccagctcttaaaattatggttttttaattgattgaacaagccataatttattcagtgaacaactgtaggggatgtacaaatgtatctggtttttttttttttttggattgtgaaactatcatcaaaagcaaagagataaccaggaaggaagacatttgtctgaaaaccatatgccaggccaggcgtggtggctcatgcctgaaatccgagcactttgggagactgaggtgggtggatcacaaggtcaggagtttgagaccagcttggccaacacggtgaaaccccgtctctactaaaaaaaaaatacaaaaattggctgggcatggtggcgtgtacctgtaatcccagctacctgggaggctaaggcaggagaattgtttgaacccaggaggcagaggttgcagtaagccgagactgcgccactgccctccagcctgggtgacagaggacgactccgtctcaaaacaaaacaaaacaaaataaaaacaacaacaacaaaaatgccatcctgaaagtggaaagattcacaaagaatgagcttcatttcttcacatttggaagaaaccaggactgtaaggtccacttagagaagcagaaggaggaccaggagagatgagtcaaacaaatgatgcttgaggaacactgattcaggaatgaggttgcaagaataagaaatgcacagctaatgttaagtagaattcaagccttcttccactaaacaatattcttttttgttttgttttgttttgtttttgagacagagtcttgctctgtcacccaggctggagtgcagtggcaggatctcaggtcactgcgagctctgcctcccgggttcatgccattctcctgcctcagcttccagagtagctgggactacaagcgcgcgccaccacacccagctaattttttgtatttttagtagagacggggtttcaccgtgttagtcaggatggtctcgatctcctgacctcatgatccaccctccttggcctcccaaagtgctgccattacaggcatgagccaccgcgcctggccttgtttttgttttttgagacagagtctcattctgtcacccaggctggagtgcaatggcatgatcttggctcactgcgaccttcacctcctgggttcaagcaattctctgcctcggcctctcaagtagctgggattcaggcacccgccaccacacctggctaatttttgtatttttagtagagacaggggtgtcgccatcttggccaggctggtcttgaactcctgaccttgtgatccacccacgttggcctctcaaaatgttgggactacaggcgtgagccaccgtgcctggcccactaaacaatattcttatcaatgaataccactacatacatgactcattgtaaaacaacattcagatttaataaaccataaatgcacagggaaaaacccctgaaaattatgattttgggaatgcttttggtcaaaacactcaacttcttagacttgcaaacagttcagtgtagaaaagccttatatatgaaatatacgtagtaaattttttaagtgtagcacaagtctcagtcaatgtaagcgaattcatgttagagagagttgagttgaatgtaaggaatgtggaaaagtgtattcagagctcctctcatctttgttttgagagcactcacacagttgacaaaccctccagatgttctgaatgtgagaaatccctgtttatggtaaatactttctgacatcagagaagtcatactggagagagaccatataaatgtagtatgtgtaaagaagtctttaaacagagctcaaccccactgatgtatgagcaaactctctcaggaaatagaccttacaaatgtgttgagtgttggagagtctttattaagaaatatttctttcagtatgtttcagaacttatacaggagaacaatactataaatgtaatcgctgtagcaaaggctgtagacacaaattataccttattcaatatgagacaatttatacttgtgggaaattatatatttgcagtgaatttaggaaattcttctaaagaagtgaacacttttaccctatagctaagaatctatagagacaccttatgaagggaatcattcagggaaaggttttacactttgctcctccactactcaaaaatcacagaagacacactggagagcaaagtgatggatacagtcatcgtgggaaaggcttcagacgtagcctagcccttatgatgtgacatcagaggactcatactgaggaaaaccccatacatgtaatttgcgtggaagagcattcaggagttgttctcatattattgaacgtaagaggactcatactggagaacactatgaatgcagtcagtattggcaagctttcaaccatggcttttaccttatttgacaccaggaaattcaaacaaattagaaaaactcattgaaaaaagatcaatgtggaaaagctattggttggaattccattttatttgacatcagggataaaggaggcaaaagccaccagttattttttaactcttaagtatctgaatgtaacaagactgcaaacttgtgactccctgcagccacagatcagcagggataagcagttctattctacatatgtccctaatttgccatagaaacaccatttaatggggactcagggtctaggcctgatgaacaatgtctcatagaaatgtctggccatatgcggctgggcacagtggctcacgcctgtaatcccagcactttgggagtccgaggcgggtggatcacgaggtcaggagatcaagaccatcctggctagcaccgtgaaaccccgtctctactaaaaatacaaaaaaaaaaaattagctgggtgtggtggtgggcgcctggagtcccagctactcaggaggctgaggcaggagaatggtgtgaacccaggaggcagagcttgctgtaagccgagatcgtgccactgcactccagcctgggtgacagagcaagactccgtctcaaaaaaaacaagaaaaaaagaaaaagaaaaagaaatgtctcccatatgcctgtaatcccagctacacaggaggctgaggcaggagaatagctgaacccaggaggtggaggttgcagtgaaccaagatcacaccactgccctccagcccgggcaacagagcaaaactccatctcaaaaaaaaaaaaaaaaatggttgccatagataatcatggctgggcacagaggctcacacctgtaatcccagcacttttggagggcaaggcaggtggatcacttgagctcaggagtccaagaccagcctgtgcaacatggagaaaccccgtctctaataaaaatacaaaaattagctgtgcgtggtggtgcattcctgtagtcccagctacttgggaagtgaggactgcttgagggggtcaaggctacagtgagctgagatggtaccactgcactccagcctgggtgactaaacgagaccctgtctaaaagaaaagaaaagaagagaaatggttgtcataggtaatcacatgtaaatttttttttttttaaagagtgagcaacagtaagatttattgcaaagagcgaaagaacaaagcttccacagtgtggaaggggacccaagcgggttgcccataaatgttatcagtggcaacagcgtatctgtttttctacatcacgtatgaataaaagaaccgtcaaccttgaagaatggtgcaggaatcatatggcaacagcgtatctatttttctacatcacgtatgaataaaagaaccgtcaaccttgaagaatggtgcaggaatcatacaccttttagcatcatggggatccttatgtgtataattttatgatagtcctagatgagggctgaaggatatgctatcaatttttttctgcataatccaaatattatcactccaaacaaatcagagagctttatactaacttgctaatactttgccaatagcattcttctatctacttgaatagaagcatcataaagagttgtatgttggccaggcacggtgactcacacctgtaatcccagcattttgggaggccgaggcaggaggatcacctgaggtcaggagtttgagacaagcctggccaacatggtgaaaccctgtctctagtaaaaatagaaaaattagctgagtgtggtggcacatgcctgtaatcccagctacttgggaggctaaggcaggagaatcagttgatcccgggaggtagaggttgcagtgagccaaggttgtgccattgcactccagcctgggtgacaagagcaaaactccatctcaaaaaaataaaaaaaatgagttgtacgtatcttcacatttctaagggcatgtccaatgtcttggcagggttaaaaagacatcatagtctggtgaagtacccatactccaaaactagtgcaaacttcacaagtttcattgcaaatcccttacaaagagcacagggtatgtataagcagcattggtttctcttctgaaaccctggacactagaagataagtgaagattccagaaacacaaagactctgatttcaggatttgatgctcagcaaatatatcattcacacatatgaggagagagtaagcattttcagacctgttagcattcaaaatttgtattctttctggaaaaactgcccaagagaacataatagtaatttcttacaatggaagtatgagccatgtccccaaaagacatctaaaaggacactcatagaagcattagtcataaggggccaaaactggatacagcccagcagtccatcaataataaaatgtataaacaaaatgtggtacatccatagtggaatactactcagcaatttaccaaacattaactactgatacatgcagcaacttggatgaatctctaacacattatgttgacacagaaaaccatagactatatgattccatttatatgaagtttgaggacagaaaaaaaacttatgatgataatcaggatagtggttaactctgggagatattaaccaggaagtggtacagggttttggaaatatattttctgttgacctgtgtgatggatttttatatatggacattatatatttatatatttagacatatataaaaaaactcatcaagttgtgaagttgaggactttatgcctatatatatgtttatgtgtatatatatgtttaaagcttatatagtttatgtatataaaggttacatataaactttaatttaattaattaattttttgagacaacagtctcactctgttgcccaggctggagtgcagttgtgtgatctctgctcactccagcctctgcctcctgggtttaagtgattctcctgcctcaaccacctgaggagctgggattacaagcaagcaccaccacacctggctagtttttgtatttttagtagagacagagtttcaccatgttggccaggctagtcttgaactcctgatctcaagtgatcctaatgccttgacctcccaaagtactgggattacaggtgtgagccaccgtgactggactaaactttaattttaaaagttttaaaacggccgggcgtggtgactcgtgcttgtaatctcagcactttgggaggccgaggtgggcggatcacgaagtcaggagatcaagaccatcctggccaacatggtgaaaccccgtctctactaaaaaaatacaaaaattagccaggtgagacggtgcacgcctgtagtcccagctacttgggaggctgaggcaggagaattgcttgaatccaggaggtggaggttgcagtgagtcgagattgcgccactgcactccagcctgggcgacagagtgagactctgtctcaaaaataaataaagaaagaaataaataaaagttttaaaactatatgcaagctggccgggcacagtggctcacgcctgtaatcccagcactttgggagtccaaggtgggcggatcgtgagatcaagagatggagaccatcctgactaacatggtgaaacctcgtctctactaaaaatacaaaaatcagctgggcatggaggcgagcatctgaagtcccaggtactcgggaggctaaggcaggagaatcacttgaacccaggaggcagaggttgcagtgaaccgatattgcgccactgcactccagcctggcgacagagtgagagtccatctaaggaaggaaaggaaaggagaggagacgggaggggaggggagagaagggaaaggaaaggaagaagggaagaatagagggaagagaggagggaagagagaaggagagaaagaaggaaagagagaaagaaggaaagaaagaaggaaagaagacctatatgcaagctgatgggatgatgggatccaaaggacttatgctgccattttaaacagtctccaaacaaagacaaaacaaatgcctctgccactgctgtgctatgagtcaggatgcttgctgggctggtagcagctaacccacgtcatcagataatgtttactcacatgcctggagagttagccagaatagcttcaggatcagtatgagccagcagctcaacaatgtctccaaatactcaatttccttccacccttcccctcagtggtctgcagtattgattattcttaaattggctcccactgacagccttatggctcagcttcttctttttttttttttttttttttggaatgaagtttcactcttgttgccctggctggagtacaatgtcgcgatctcggctcactgcaacctctgcctcccgggttcaagcgattctcctgtctcagcctcccgagtagctgggattacaggcgcccaccaccacgcccggctaatttttgtatatttagtagagacgggggtttcaccatgttgactaggctggtcttgaacttctgaccttaggtgatccacccgcctcagcctcccaaagtgctgggattacaggtgtgagccaccacgcccggccaatatggctcaacttctttcaagagactgggctttttttttctgtattagtttcctatcaccactgtaacaaattactacaaactcagtgtcttaaaacaagagataagagaaatattaaagtaagacaaatagattctctcatttctggaggccggaagcatgaaatccatacctgggccaaattcaagccttggaggctccaggagagaattcattccttgcctcttccagcttatggtggctgctggcttttttttttttttttttgagacggagccttactctgttgcccaggctggagtgcagtggtgtgatcttggctcactgtaatctccccctcccgggttcaagcgattctcctgccttagcctcccgactagctggcatgacatgcgcatgtcaccacatccaggtaatttttgtatttttatttttaatttaattttattatttttttattttttgagacagagtcttgctctatcacccaggctggagtgcagtagcacgtctcagctcactacaacctctgcctcctgagttcaagccagtctcctgcctcagcctccccagtaactggggttacaggcgtgcaacaccacgtccagttaatttttaaatttttagtagagacagggtttcatcatattggccaggctggtctcaaactcctgacctcgtgatccacccccccttggcctcccaaagtgttgggattacaagcgtgaggtaccccgcccggcctatttttattttatttttttatttttttgagagggagtcttactctgtcacccaggctggagtgcagtggtgtgattttggctcactgcaacctccgcctcccaggttcaagcaattccctgcctcagcctcctgagtagctgggattacaggcgcctgccaccatgcctggctaacttttgtatttttagtagagacgggttttcactatcttggccaggctagtcttgaacttctgaccttgtgatccacccgcctcagcctcccaaagtgctgggattacaggcatgagccactgtgcccagccaacttttgtatttttagtagagacggggtttcatcatgttggccaggctggtctcaaactcctggcttcaggtgatctgcctgcctcggcctcccaaagtgctgggattacaagcatgagccactgcgcccggcctgctggcatgttttgacttgtgactgcacagctccagtctctgcctccacggtcacatcaccttctccttttctgcctatgtgtggtcacatctgtccctgcctccctcttgtaaagatacatgtgattacatgcacaatccaggatcatctcccctctcaagatctttaaatacatatgcagcccctgtctctacataacgcaacattcataggttccaagaattcaggcctgacatctttgggggacatttttcagccaaacacactctcctaacttttaatcaaagtcctgggcttcactctccgtccatgttcattgctttgacacttgtcatggacaggagggtgccttgcactgactggcttggaccagagtgcttgcatgcccctggattaatcactgcagcaacggagacagaatgaggccagtgggccatccactggagctgagattgaggggcagcttcacccatagctgcccaaaagggtatctggggtgttctgagggtgttctggggtgtatctgaggaaagggatgagtggaaaggtctcacaaatgaatctttttttttctttttttttgagatggcgtttcactcttttttgatgggcattgcccaggctagagtgcaatggcgcgatctcagctcaccacaacctctgcctcccgggttcaagtgattctcctgctcagcctctccagtagctgggattacagtcatgtgccaccacgcctggctaattttgtatttttagtagagatggggtttctccacgttggtcaggctggtctgaaactcccgacctcaggtgatttgcccacctcagcctccaaaagtgctgggattacagacgtgagccaccgcgcagcctcacgtgaaaaagacttttctctcaatttcacaatctgtctctctgtctctctctctctgtcacgttttgaaattctggcttccctcctatacccaagggagagctcacacttctcccttacctgagcgaaatgccatctttcccttccagcaccccattcaatcctccaccagggtccccatgtcctggtagctgctccctggatgttgggacttcactcagttccatttttttttttttttaggagacagggtctcactctgttgcccaggctggagtgcagtggcctgatcataactcactgcagccttaatctcccgggctcgagaaatcctcgcacctaagactcctgagtagttgggattacaggcacatgtcaccatgcccagctaatttttaaatttttttggtagagatggagtctcactatgttgcccaggctggtctttaactcctggcctcaagtgatcctcctgcctcagcctcctaaagtgctgggattgcaggcatgagctgttgaccctcagttccagatctttgctggcagcaagtccggaaacttccatccggatctggtttgtggccttataacttaatgtgaggagaggtctctggggtagatgggctccacccaagcagacttttgtgccagctactgtggctgtgccacccaccttcattgcagcacagtctggcgccttctacagatgccaaaaaaaccagttacactcttttccagcttttctcccagccaggacatggatgcatgtgtcaatcctggctaacagggtcagagcgagtcaacaacagagaagtcttccgaaaatgttgtattactttttttttttttttttttttgagacaaagtctcactctgttgcccaggctggagtgcagtgtcgcgatctcggctcactgcaacctccatctcccaggttcaagcgattcttctgcctcagcctcctgtgtagctcggactacaggcgcgcaccaccacacccggctaattttttgtatttttagtagagaaggggtttcaccgtgttgaccaggctgttctcgaatgcctgacctcgtgatctgcccgcctcagcctcccaaagtgctgggattacaggcgtgagccactgcgtccggccaaaatgttgtattacttctttgtggtagggagagtaatgccccctttccttcagagatgtcctcattccaaaccctggaacctatacatatgttaccttcgcatggcaaaggggacattgaagatgccattaaggatctgtttttgttttagagacagggtctcactctgtcacccaggctggagtgcagtggtgtgatcatggctcactgtagcctggaactcctgggctcaagcgatcctcctgcctcagcttcctgagtagctgggaccacagatgcatgccaccacacccagctatttttgttgttgttaagacacggtcttgctctgttgcccagaccagtctcaaactccttggctcaagcaatcttcctgcctcagcctcccgaagtgttgggattacaggtatgagccaccatgcctggccagattcttgagatggggagattattctgaattacttggggcgggccctatttaatcaaatgtctttgtataacttgaggcaggaatcagagtagatgatgtgatgatggaatgagagatttgaaaatgctacactgctggctttaaaattggaggaaggggccataagccaaggaaggcaggtagtctctagaaactggaaaaggcaaagaaatggattctctcctagaccccccagaaggaccacagtcctgctgacatctttattttagcctagtaagacccattttggacttctgacctccagagctgtgagacaataaatttgttgttgttttaagacacaaagttttggtaatttgctacagtggcaatagaaagcaaatacacttcctgatgccaacttcttcagccaaatgttgcacggctaaatgctagacttggaactgtaatcaccatcttaggactgcaaagacgtgtgcctcagaaagaaccaaggccatacactggggagggctgagccaaaggagggacagtgactggttacagctcatacttgagcccaggggtcaaccgtagaagcccttacatctggatttaattacattttttattttgtaatttttagttttatttgtgctgagacagagtctctggagtgtagtggtgcgactacagcctcaacttcccaggctcaggcgaacctcccacctcagcctcccgagtacctggattacaggtgtacaccaccacacgcaactagtgttttgttttcgtagggatggaatctcacacaaaaaactgggcaagtatgttccccaggctggttttgaactcctgggctcaagcagtcctcccaccttggtctcacagtgttgggattacaggcatgagccactgtgcccagcctggacttaatgaaaaacaaacaaacaaacattttttttgagtcagtcttgctttctcacccaggctggagtgcagtggtgtaatctcagctcactacaacctctgcctcctgggttcaattaattcttatgcctcagcctcccaagaagctgggattacaggcatgcatcatcacacctggctaatttttgtatttttagtagagaaaggtttttaccatatcagccaggctggtcttgaactcctgacctcaagcagtccacccacctcagcctcccaaagtgctgggattacagatgtgagccactgtgcccagtcagtgaaatttaagatcatgaatggtggcatactgtcacttctgccaaaactacaccttacatgataaccctttcttgctccccaccagcttttgctctcaagtctcgtttggtcatgctaagccacagtttggggactcctaggagcagccatcacaggtaaccagttctgctggctcaggatggcccctgctgccctgactcagagacacttcctgcaaggcagacatctcatgcagagcagaggccactgcagtcagaaggaagggcctggtagcctcagaggcacagccaaggggctgcaacgatggaaaggagatattccacaagtccaagagtgtgacatggaagcacactctgggatgtggtggactcaagtgatccatgcagatgtggatgctgtctctctttctctgttcatagagtgtggcatgggtcctctctgggtgaaaataggtgcccagaattaatcacacacttccattcaaaataaactgtgccaacttgctgaaccacaaaatgatttcctcgccatggcccctaaataactccgtgataagaactgtatgctattgatggctctgaagtccaaatttattggcaaaagcaaagaacatgcctgaactagtcatttctgcaggcgtttctccttaagatgagtttgaagccaattggttatgtgaagaatagcaatcagttctttctcacactggaggaggaggaagcacaaaagaaagttcaagggtcaagcctcccaaaaggctctgttataatcctatgtgctctttcattgtatctagtgatgaatttgggtaactgacactttactcattggccatctatccttgaacttgataagcattttcatttatgtaagtttacttgtaattcttccaaaacttatcttcacatttcccaacaaactaatttcagacattttgtttttatgattctattgtgacaggaacctccatttcaatatacttgttgcaggtatagattttgtgcattgctttgtggtgttgatttgtccatcttttgtattctgcctagcttattgtaatcttgatttttaaagttttcaattgggtttttaaagtatgttaatgttaataaatgcatttttaggtttcctttcccaatcattacagcactcaggtctatttcatatcagattgattgatttattaagacaaggtcaagctctgtcgcccaggctggagtgcagtggcataatcagggctcactgcagcttcaacttccttagctcatgatcctcctacttcagcctcttgtgtagctaagactacaggagtgtgtcaccacatccagctacattttttgctttaatacagatgaggttttgctacgttgctcaggctggtcttgaactcctgagctcaagtgaccctcccgccttggcctcccaaagtgctgggattataggtatgagcctggcctcatactttatttgtagtaacaagaatatctggaaaatgttcagcattgctgagagcagatttctgtcattttcgatgtgtgtatcctccacggttattgaatggaggaataaacaagaaaaagactcaagaagagagacaggagtcagttctcatcagagaagaaaaggtcgatttcctaaggcaggaaatattgagatgggttgtgttcaggactagcaggaggtgtgtggctggcttgttccttgtctacatcctaatggcctaaagaaaagatgccccacactaaggacagcaagagggaaagagtgagcctcatcctccgtgacttcagtgggcagcttaaccagcaccagaaaagacctatacttgcagattttctttgtgggaaaacggcgttggttatttgggtttttatttatttccaaccaaacatgccttaacggatacagggtgcaaaggcatgtactagattattccaaacctgcctcactggtttgtccggcattctgtggacttcctgcattcctctttgaggcaggccgttttctggaggttgtttgtgatcggcctctgctcagagcccaaattcttagcctttcccccatgtgttatgtccagtgtggattatcttgatggtgagtttacctttgatgttggggaaaacaggcaaagaatgaatgagcagcagtaaccaaagagcctcttttctgggaaaaaagctatgatattaataatttatagttcaaatgcacattaatttatccatacttctgtaaccttacattcccaagctctcagaagttcagagaggtgtcctcaaagctcacatttcaaagatggaaagacacatctttcttctttttaaaaatgattttaaaatgtatccccctttacatggaacaatttgagatgctctgtgtgatgaaacagagacagagaatgatgagtggagatcaaatcctgggtccatgattcagttgcacagctggcttaggactcagttgaacaccactagctgccataatggtccagctgccataatggtttgggccaacttatagctttacatattttattcttagtcatatgttgtttatttattatttatttattcatttatttattttgagatggagtctcgctgtgtcacccaggctggaaggcagtggcacaaactcggctcactgaaagctccacctcctgggatcatgccattctcctgtctcagcctcccgagtagcggggactacaggcgcccgccaccatgctcggctaatttttgtatttttagtagagacggggtttcaccatgttagccaggatggtctcgatctcctgacctcatgatctgcccaccttggcctcccaaagtgctgggattacaggcgtgagccactgcgcccggccatatgttgtttaatttaaaccaacagtagaccattgatttaaaaaagcatatggggccaggggcagtggctcactcctgtaatcccagcactttgggaggccaaaatgggcagatcacctgaggtcagaagttcgaaactagcctgaccaacatggtgaaaccctgtctctactaaaaatataaaaattagctgggcgtcgtggcatctgcctgtaatctcagctattagggagaatgacgcaggagaaccgctagaacccgggaggcagaggcggaggttgcagtgccattgcactccagcctgggcaacaagagcaaaactccatctcaaaaaaaaaaagcacatggaaaaatattaatatatttaaataactcagtatctcaataaacctatgcctgactatgtggaatatatatatatttgagatggagccccctttagtagagacggggtttcaccatgttggccaggttggtctcgaactcctgacctcaggtgatccacccacctcagcctcccaaagtgctgggattacaggtgtgagccaccgcacctggccctatgcagactatattaagagagaaaaagtaaaaattaaactttgcaattgaatgaaataactactatttctacaacacacattttcacttatgatccataatgccttctatgtaattcaaaattccagatattttctaacagaaaatttctccctgttatgagtctgcaaaatttatatgaacaaggctatttatattttgtctctcttccacctagtgtaaatcttcttgtattttgctacagatatactcatgtgtttgatggcaggtgctaccccacacctcttagggatttacacactgtatggtgtaaatacattaccatcctactaaaatccaaatgatcatgaattccaaaatacatctggctcagaaggttttgaacaagcaatcgaggcactgtctaaatccaacaacgatgaataaattttttcaacattttacatgtttaatagttaacatttcttcagaagtcatttttattttacaaattacaataaacagcatatttaatttgctaaacaggaaaagagtatgcagttattaaaagttgaattaaaatggctctcataaatcaatcttcaataatatgcttatataaaaccatctttaggttgggcacagtggctcaagcctgtaatcccagcactttgcggggccgaggtgggcggatcctctgaggtcaggagttcgagaccagcctggccaacatggcaaatccccatctctactaaaaatacaaaaattagccgggcatggtggcacgcccggctactcaggaggctgaggcagggagaatcacttgaacccgggaggcagaggttgcagttgagccgaaatcacgccattgcactccagcctgagcgaaagagcgagactctgtctcaaaacaaaaaaaaaaaaacaaaacatctttggtcaggcatggtggctcacgcctgcaatcccagcactttgggaggccaaggcgggaggattgcttgagtccaggagttcaagaccagccctgacaacacactgagacctcatctctacacaaatatttattaaaaattagccaggtgtggtgatgcacaccagtagtcagtcctagctacttggaaagctgagatgggaggaacacttgagcccaggaggttgggccagcagtaagccatgactgcagcactgctctccagcctgggcaacagaacaagaccctgtctcaaaaacaaattcttttaatcaaaaatcaggttttatcctataccacataaatagaaagaaatcattagaagaatttccacctgcctgggcaacatagtgaggtttctgtctctacaaaaaagtacaaaagaggccaggcggggtggctcatgcctataatctcagcactttgggaggctgaggtgggcagactgcctgaggtcaggagttcgagaccaggctggctaacatggagaaaccccgtctctactacaaatacaaaaattagccaggcatggtggcacacacctgtagtccaagctacttgggcagctgaggcaggaaaatcgcttgaacccaggaagcagaggttgcagtgagccgagattgtgccacctcactccagcctgggcgacagagcaagactctgtctccaaaaaaaaaaaagccaggtgtggtggtgtgcacctgtcccagctatttgagaggctaaggtgggcggatcacttgggcccaggaggtggaggctgcagtaagctgtgatcgcaccaatgcattccagtcggggtgacagagcaagaccctgtctcaagaaaaaaaaaaagaaagaaaaaaaagaatttccaagggggtttgcttccttgtgattatgaagggctagacgtatcctattcaaatccagaacaaaacaagactattagtaaacatgactacttaacatagctctgtcatactagctaggactatacaatgttaattttttaaagttgaaatatggaaaaagaagatatcaaattacttattaattggggatggtgttgtatctataatagacacgaaaaatccaatgaaatattattagactataagatatctgcacagtctctgagtaaatactcctatgccaaaatcaacacactaacagcaacaattaaacaatgtgtagcctgaggttggatcctccacagtgaccaaaaaaaccaacaacccgtggaacaagtttagcaggcagtgtacacgaccaccagagggaggcagagggctgctgagacctgccaggaaatatcaagaaagaggacacagggtcctgagcactgagagagatcattagggccctcaggtcccaagaagacaagaccatactgggacctgggacctaaggaagataagaaaacaccagatgtcggtccttgaggaagccaagagaatacctccttgtcctgagctcccaaggaagatgagagcaccctgggcccaaggatgggtggcacacaccaggtcctggacagctacagacttaggtttcctctccctagacatgagcacctcagcttccaggagcaaactggaccacagggggacactaggcagaggatcctgctcctcctccccaatgcctggggtacagttagccctgatcatctctccagaactagggtagacgtttggcctcattcccatcacacttgtggtccacctagtcttccctccttccccttgcacacccctgaccttcctactcccttcctctaatccccagaactagggtggacgtttggccacgttcccatcacacttccggtcctccgagtttccctcccctccctgaccttgagtggacacttggccctgtccaccctcactttcaggcaggacccatctcccagaaacataagtgccgtcagtcccaactcctgcacacttccggctctcccagtcctccccttctttctcgactttgaaactggtggaacttcagtacctctccccactccccccgcgacttccgtcttccagtccccctccttccccaaaagttgcgtggactctagccccgcctcctacattctccccgccctccctgtccccgcccctccacccagatggacggccagttaggcccgccccctgcacttccggccctacccgcccttcctcttcccaagggacgtcataattaatcccgcccccaccgccacccaaccaagcatcacccattccagcacttccggcctgacccctgtccagcgcctttcctttctccagcttctgctctgccccaagagtggtcgccttcgtggcagggcacgactctctcccagctcgggtcgccgcccacattagtgtggggccctgcggcctagcgtccctcaccagaggcctccccttgcctagctggaccgccgagggacatcgacgagtatcctcctcctgctgtccccggcttcgcctgccgcccctaaccggccagtcaagatggccgccgctgggtgaggcaagctggcgcgccgcgggggcgtctgggagttgtagttcgggacggcgggctgacgcacttcgccgccggccgacgggcgccattgtgcggcgcgcgccgggtgagtgccgcgcgaaacctgcgtccgtcgggggctgcgctgggcgggtccagaaccgttagttgggggcgagcgcggcctctgcattttccgccgagctcgggtaccctgagccggccgtgcctgcagtcctcccgccgctctgtgggatggggtcggtgacccggaaccccgaggggagacagtgctttcggggcgccgcggtggagagaacagatcgcctccggaagcgtggggtctgggccagggaggcgatcccctccgatgcgcgggacagaggaggctcggtgtcctctcggggaggggaaaactggtcctatccagtcctgtgggagtcctatgactcactctgggcgttttccagtttgggtggacttgtcatttcccgctgagggagccgttcctgggcggaggctgcggtagctccccagcggacaccttaagcctctccctcccctcccaacttcggtttcctcaggactctgcccacttccaccagagacacattgagaaggaggaaactatggcctccaggcttccgacggcctggtcctgtgtgagtagaggcttccttcagcttttgagtccgctactgcacctgggaggatgcggatggtggtgagataccaccttccctgagatacccccatcctccagagcacctcggggagggggtagagattggttgggcatgagagatcctgcgtgatggtggaaccgcaggttgcttggttttccaagggtgtagttagaatagagaccagattgtaggggcttctgaaggccaggttaaggctcttgcttgtatcctttatattgggaagagtaattgacaggtcttttgtttgtttgttttttgttttttgagatggagtctccctctgtcgcccaggctggagtgcagtggcgcgatcttggctcactgcaacctccgcctcctgggttcaagtgattctcctgcctcagcctccccgagtagctgggactacaggcgtgtgccaccatacccagctaattttttttttatttttattttttgtgtgtgttttttgtggagacggggtttcaccatgttggccaggctggtctggaactcttgacctaaggtgatccgaccatctcggcctcccaaaggtctatgcagggatcaggcttatgtttagatttcagcagataaattggcatcaagcaagaggtgacagcagcagagttcaataacaagtagaaaagacaggtgaggatggatccctgacaggtgaaggagatagaaagaagcatcagggccctgggtaggggctgacggcttgggtgtgatggtgcagctcagagaattccctaggaggcatacgcaccactcccaaagtcagaattttcaaatgaataagaaatagggggccgggcgcggtggctcacgtctgtaatcccagcactttgggaggccgaggcaggtggatcacgaggtcaggagattgagaccatcctggctaacatagtgaaaccccgtctctacttaaaaaaatacaaaaaattagccgggcgtggtggcgggcgcctgtagtcccagctactcgggaggctgaggcaggagaatggcgtgaaccggggaggcggagcttgcagtgagccgagatggcgccactgcactccagcctgggcgacagagagagactccgtctcaaaaaaaaaagaaaagaaaaatagggccgggtgcggtggctcacatgtgtaatcccagcactttgggaggccgaggcaggcagatcacaaggtcaggagttcgagaccagcttgaccaacatggtgaaaccccatctctactaaaaatacaaaaattagccgggcatggtggtatgcgcctgtaatcccagctactcaggaggctgaggcaggagaatcgcttgaacctgggaggtggaggctgcagtgagccaagattgcgccactgcactccactaggagacagagtgagactctgtctcaaaacaataaataaataaattaaataaataaataaataaataaaatggacagattttcatatgctacagagatctcatgtgttgctctccttattgtaacctgaatagagtcaagcttgggtttgcttggggtttcagacaaagacaggaactcaggatgagactcccaaaatgcccttgggtcatcttgtagaccattctgtgctttcactggcctggtcagcctcccctgtctttcttttgtcgtggatgcggatggcctgtggctgaacaagaatctggatttttaggaaccagtgacctttgaagatgtaacactgggttttaccccggaagagtggggactgctggacctcaaacagaagtccctgtacagggaagtgatgctggagaactacaggaacctggtctcagtgggtaaggctggcctccaggtcaagaaggatctgtgctttgtagcacaaatgtagcacctctgaagtatgtgtctgcttgggctcacactgcaggggcaccagtaggaaaagggcagcttttcagtatgacttctgaatcattgcctagtccatccctccctgaataccagggagatgggtctgtcagggatgttttcagctgcagtagtggatgcttattgttcttgcaacaagagttccggccaggcatggtggctcactttaggagactgaagcaggaggattgcttgagcccaggagtttgagaccagcatgggcaacatagaccgtgtctctattaaaaaaaaaaaaaaaaagaaactccacagaaattccagacaatgcgatgccagtgtcccaacagcttaggagtagcatcaaagagcctgtccctgccaggcacggtagcttacgcctgtaatcctggcactttgggaggctgaggcaggcagatcagttgaggtcaggagttctagaccaacctgaccaacatgatgaaaccctgtctttactaaaaatacaaaaattagccgagcaccccagctactcaggaggctgagccaggagaactgcttgaacatgggaggtggaggagattgcagtgagctgagatcagatcacagcactccagcttgggcaactgagcaagactccgtctcaaaaaaaaaaaaaaaaagcctgtcccttcaaactctggttattgtgaacctttccatgttccccctagtcattgcacagctgtggctccaagcattgcatctgtgttcaaggcagaaacaaggagaaggggtagccctttcacagctgtcatgtttaaccagaaagcaaaagctttcccagctgaccgatctccctttgtgtctggctgaccagaactggaccccttagctgcttggcaaaggagtctaggaaagccaacaacagggatggatggagttgtgttcactgctctaggccagaagtcatgtgccttagcaggggagaagctggagacggcttgtgctgcagtaggatagcattttctcctgaacacagacccccacaagccctgtctcttttcctttgagcagaacatcagctttccaaaccagatgtggtatctcagttagaggaggcagaagatttctggccagtggagagaggaattcctcaagacaccattccaggtgagaaccagacatgggaagcccccacagggaaggggccaactgatgagtcagggaccagtatcttggaaaagcagtagacattgggataccccaggtgggatgctgtgatgagcagttgcagaaccaaactcgaagtttttctctggctccacagtcagcagtgtcctacttggttgaaagtgaacctgttgctggtggcaggtgatacttgtgttgacagtaggggctcccttagtctgttacacgcattgtctactgccctcccctcataatcactggtaaccctggtgtgtatttccagccagactttcttatataggcttacgtgaatgtatgtgaatatatatacacattttgggggtgttataatacagacaagtcagcttctttttgttttggagacagggtctctgtcaccgaggctggagtgcagtggcatgatctcagctcactgcaccctccgcgtcctggactcaagctgtcctccgacctcagccttccaggtagctggatctataggcatgtaccaccatgcccgtttaattgtttttttgtagagacagtgtttcaccatgttgcccaggctggtcttgaactcctgagctcaagtgatccatccacctcagcctcccagagtgctgggattccaggcatgagccaccgtgtctgtctggtctgctttattttatttattttttgagatggaatctcactctgttgctcaggctggagtgcagtggtgtgatctcagctccctgcaacctccgcctcctgggttcaagtgattttccagcctcagcctctgcagtagctgggattacaggtgtgcaccatgactccaggctagtttttgtatttttagtaacggacggtttcaccatgttggccatgctgttcttgaactcctgacttcaagtgattcacccaccttggcctcacaaagtgctgggattacaggcatgagccattgtgcccgacctctgctttattcttaacagcttcagtgtggtccacatttgatttttcttcttttggtggacattaaatttactgcagaaaacttccttgcatactttttttttgcacgaacaagttggtttttctgtaggttggatttctaaatatggaactacaagatcagccaatgttgtaaactaaaaatctggtagtgacaaattgccatctcaaatcctttaaggccaggcacagtggctcacacctgtaatcccagcactttgggaggctgaggtgggaggttgtttgagaccctgtctctataaagaaaataaaataggacaggcacggtggctcatggctgtaatcccagcactttgggaggccaaggcaggcagatcatttgaagtcgggagtttgagaccagcctggccaaaatggtgaaaccccatctctactaaaaatacaaaaattagctgggcatggtgggtgcctgtaatcccagctacttgggaggctgaggcaggagaattgcttaaacccaggagatggaggttgcagtgagcagagatcatgccactgcgtgacagagtgagactccatctcaaaaaaaaaaaaaaaatatatatatatatatatatatatatgtaaaaaatagatgtgtgtgtgtgtgtgtgtatatatatatgtatatgtatatatatatatatatatatatatatataaatctttaaaaataggccaggcaccaggggctcatgcctataatcccagcaatttgggagtccaaggcagtaggattgcttgaggctaggagtttgaggttatagtaagctgtgatcatgccactgcactctaacctggttgacagtgagaccctgtctcaaaaaaaaaaaattaaaaatccttcagcctacgtagagttggctgaagtaaatgacaactctttttcttctttatcaacagcaatttgtaatggtctttttaaggtttgcagatctgatgggataaatacaatatgttcaatttagttcacattttccgcacaacggaccaagttggacatattttataaatctatggcctgtttgtattttttcttttgtgagttcatatattttctcatttttttcttgtttgtgggaattctctatgttctggatgttaatattgaaatatcatatcccagaccatatattgtctacctttatgtagtctctatacagaagttttataatttctttttcttttcaaatatgtctttgtttctgttttagattctgtatcatatataggtagattatccaaacactttagtgtgttgtggtatttgttatatacctcgaactgctgcgctcaagcagtcctcctgactcagactcccaaagtgctgggatcacagcacttaaatttttttctttttagttcagtttatctggaatttcgttttatatatgggtggggttcatcctctgcttattggaaatatcatatttgtcatgggctaaatagctgtctttatatactggcctctatgggctctcccttgatcttttctgtctctgagtaaatgccatgttactgtactttgatatatagtagttccccttgtcatttaaaaaaaagaaaaagtcttagctggctttagcgatctatttctccagatgaacacttattctcagcttgtcagtgttcattgagaaaatcttgttgggatgtgtattacatttaattaggttttcattattactattacctgatcaggttaatcctgcctcatggtcttgcatagttgttccagatgaacctgtcatgctcttaaattctttgatcttttttggccgggcgggcacggtggctcacacctgtaatcccagcactttgggaggctgaggtgggcagatcatgaggtcaagaaatcgagaccattctggccaacatggtgaaaccctgtctctgctaaaaatacaaaaattagctgggcgtggtggttcgcacctgtaatcccagctgcttgggaggctgaggcaggaggatcacttgaacctgggaggcagaggttgcagtgaacccagactgcgccactgcactccagcctaggcgacagagcaagactctatctcaaaaaaaaaaaaaaaaatttatctctctctttttttttttttttttgagatggagtctccctctgccacccaggctgtagggcagtgcgatctcagctcactgcaacctccatcctctgggttcaagtgattctcgtgcctcagcctcctgagtagctgggactacaggcatgtgccactatgcccggccaattttttaatcatctgtaacagttgtgttacatcatgtagttgtattcatcatggatagtatatccaaaattgtgtgaagctcagagtttaaagagttggtatctagtctctgacttaaatggaaaagtttctaggttttgatgagcttaatgctagattctgctttgattcaaatcagttttatctggattaacaaatagtcatgttgtctttcctgatgaataaaaatcggtaatatcttctatttcccttctagagcatactaaagtggtcacacaattcttctcctttgagcagttaacataggagtataatagatgtagaagttttgtaacgtgctgctggagtcttgaatttttaaagggtttttgtgtcagtattcataaattatgttggggaggtggttttctttgtgtgtttgcttggtcagcttttctgtcagtgtgctgaatgctttcccttctctttgttttctgtgctgtggtgcaagtggcatcagaactgcccacttctggcagtattgagctgtgacatctgcacctaacccccatccttggtgatgacctgtttgccacagaatagagggctagagtctttctctgtgactctccccaacccccaacctttctgggggccctgtttctgatttcttcgtatttcagcttcctggctcagcattagtattttggtttttgtttccacattcaaagtttttccttccattcccttcactgaaaatctttgttagcaaaagaggtcactaaactatttcatctgcaaagtctccagcaatgcaagtactttgtatctgcctgcagtggtttctgtgccccttggtttttgagacagagtctcactctatcgccaggctggagtgcagtggtgccatctcagctcactgtaacctctgcctcccaggttcaagtgattctcctgcctcagcctccagagtagctgggactacaggtgcacaccaccacgctcagctaattttttgtatttttagtagagactgggtttcaccatgttggccaggatggtcttgatcttttgaacttgtgatctgcccacctcggcctcccaaagtgctggtattataggcgtgagccactgcccccggcccagcctcctgatcttccttttggtctttatgtctctggattactcaggctgtgacaagtctgcgtttcatccttcttggagctgaggactcatgtcctgaatgggcaaacctccaggccatacacttctggatgatctggtagtatcctaaatctggctgatgtctggggcactgtgggtgccacacatcttgggagagctgactccacaggtgacagattcagggtggtgtcccagagtcagaggccacatgaggggaggctcatcaggaggtactgttgcagtctcagcctgaggtgatgggtgtccaactcatctctgctctgtcacagaaagagtccttaattagatgctgtccttcctcttctccttcttccacctcacagatacttatggagggccttttctgtcccatgcaatatacttactaaaaacttcggtgataaaccaaagcacttacataatctctaccatcttagacttcatagtctaaacaatgatggccttttacaaacatgttacacagatacagtgataaatgtactgagaaggaaaaaagcctgatataaagaaggggagcagtggggaattacttcagaagacctagtcaggggacactgcaggggtgagattttagccaattcctgaaggaaaataagtccgtggacatataggattggtggtgaagacagcttctaggcatggaggcaccatttgaggtgactgtcagatgggaaagaacttagcatttcgagggccacttcgagcctagtggactaggagtaggtaaaatgaagggatgtgacattgcttttcacagctcactctgggtggctgtgaagaaagaattgtggtatgtcacagattggaggcaggcagggcccgcagttatacttggtaatacctgctaacatgtggtaataagtggcctgagagtaacagcacatttggggaaaatcaggtgtgtgtgattcataggtggactcagtggacctaggtgagtgattgagagggatgaaagaacaagccatcaagaatttctcgtaggtgactgcgtctaacatatttcatacgtaaagtcggacctcctgcacataacaaaatccacagatgctcaagtgcccaatataaaatggtgtagtgtttgcatatgacttactcacatcctcccatatagctgaagtcatctctagattacttataataccgaatatgatgtaaatgctgtgtaagtagttgttacactgtttagggaatggtgacgaggaaaaaaagtttgcacatgttcagtacatttgcagccatcttttatatatttttttgagttgaggtctcactctatgtatcacccaggctgacgtgtagtggcatgatcatggctcactgcagccttgaactcctgggctcaagtgatcctcctgcctcagcttcgtgagtagcttggactacatgtgtgcgccattacgcctggctaagttttatatttttttgtcaccatgttgcccaggctggtatcgagcttgcctcaagcaatcctccccgcgtcagtttcccaaagtgctgagattaccgtctttagctaccatgtttggcacatcattcatttttttttttccctcaaatattttcaatccagagtttgttgaatccacagatgtggaacccacagaatatacaggtccaactgtacattctttttgtcactatcttttttctttttttttttttgagacacagtctcgctctgttgcccaggttggagtgcagtggcacaatctcggctcactgcaagctccacctcctgggttcacgccattctcctgcctcagcctcccgagtagctgggactacaggcgcccgccaccacgcccagctaaatttttgtatttttagtagagacagggtttcaccgtgttagccaggatggtttcgatctcctgacctcatgatctgcctgccttggcctcccaaagtgctgggattacaggtgtgagccaccgcgcctggcctttttttttttttttttttttttttggagagtctcgctctgtcatccaggcttctgtagtgcagtggtgcaatctcggctcattgcaacctctgcctcctgggttcaagtgattctcctacctcagcctcctgagaagctgggactacaggactgtgcctgtatgtgtccatcgcttcttttaaaaatatgataaagggaccaggtgtgatggcttatgactggaaccccaacacttagggaggctaaggtgggaggatcacttgaactaaggagttcaagaccacctgacaaacacagcaaaacgtcatctctactaaaaataaaaataataagccagatgcagtgctgcatccctgtagtcccagctacttgggaggctgaggcaggaggattgcttgagcttgggagtttgaggctgcattgagctgtgattgtaccactgcacttcagcctgggcaacacagcaagaaacggtctcaaaaaaatatatctatatctatatctatatatctatatcacatatgagataaaagggtcagatgtggtggctcacacctgtaatcccaacactttgggatgccaaagcaggaggattgcttgaggccagatgtttgagatcagcttgggaaacatggtgaatacaagtctctgcaaaaaaataacaaaaattagctgggtgtggaggcaggaggatcacttcagcctgggaggttgagattgcagtgcaccactgcactccagcctttgtttcaaaaatatgtgtgtgtgtgggtgtgtgtgtgtgtatgataagggagaacaattatttctgagtttttggcattagccaaggatgtggggatgtctggtaaagacctagactttgctgaggggaggaaataaggggtttgtgttttctgtgttttttgtgttttgttttttacctttttttttttttttttttttttttgaggcaggctctcactttgtcacccaggctaaagtgcagtggccccatctcacatcactgcaacctccacctcccaggttcaggcaattctcctgcctcagccttctgtgtagctgggactacaggcacctgccaccacacctagctgatattttggactttttagtagagacagggtttcaccatgttggccaggctggtctcaaatccctgacctgaagtgatcctcccacctgggcctcccaaagtgctgggattacaggtgtgagccaccacacctggtctgttttttactttttgtgttgaaataatttttaatctttttcttcggccgggcgcggtggctgatgtctataatgccagcactttgggaggccaaggcgggtggatcacctgagaagttcgagaccatcctggctaacacggaaaccccatctctactaaaaatacaaaaaatagccgggcacggtggcgggcgccagtagtcccagctactcaggaggctgaggcaggagaatggcatgaagccgggaggcggagcttgcagtgagctgaaatagcacctctgcactccagcctgggcgacagagtgagactccatgtcaaaaaataataataataataaataaataaataaataaaaatacaaaaattaactgggcatgctggtgtgcacctgtagtcccagctactcgggaggctgaggcaggtgaatcgattgaacccaggaggtggaggttacagtgagccgagatggtgccactgcactccagcctggcgacagagtgagactctgtctcaaaaaaaaaaaaatacacatatatgtgtgtgtatatatgtgtgtgtatatatatacacactaatagtatggataactcaatagctttcacattgattgaagtttttgaattgtcccatgtcttaactgattcttgtaatgacagatgaatgagaaggcaccatagagacactcaagggtttgcaaatccagtcgaatacacctatttagacctaagaaggagatccacacagcacataaaaacatccgtgtggaagtcataggtgtttagaatggaatgctttactgtgagtgtgagacggggaactgtcttctaaagtggtcagtttctcccaacagtggcatagctgtgcatctcattaatggacagaactggtattgagtttagacttgggccattttgacaactctgtgtgcttctcgagcttcccatgatagcaagaatggcagtcaagtcagcagtccccaacctttttggcactagggaccggttttgtggaagacagtttttccgtggaccttggggtggggagggatagttttgagatgaaactgttccaccccagatcatgaggcattagattctcataaggaacatgcagcctagatccctcatgcacagtttacaatagggttcatgctcctgtgagagtccagtgccactgcggatctgacaggaggtggagctcagatggtaatgctcatttgcctgccgctcacctcctgccgtgcagcctggtaccagtttatggcctggcagctggggacccctggtttaagtagaagggaaacaaatgctaggacaaatggcattcatcctcaggaaagcactgaatgaggaatgatgctgtgacagtaagcaatgtagggaaaataggtggcactcgaatcttcagctctcactaatgtcccttcaagaaccattgccatatatgtggctcttgggtggaatacttgagatgtaaactattacagatttagtcattaggaaaggaatgcagggaagagactattatgaaggtcatgatttaggaaaccctgcagggcattttacattttttacttgtcaagaagttaagtagaggccaggcacggcggctcatgcctgtaattgcagcactttgagaggccaaggtgggcagatcatttgagctcaggggtttgagaccaacctgggcaacatgacgaaaccctattgctacataaaatagaaaaaattagccacacatggtggcgtgtgtctatagttccagctacttgggaggctgaggtgggaggttggcttgagcctggaaggtggaggttgcagtgagctgggatcctgccactgcagaaaaaaaaacaaagttaagtaggaaatgagtcctacaaataagaacttagcagcttttttgaaacatagaccaaacatgagtctgaaaaataagtttgatgaggtgagtgttttattgggaggaagaaagccaaattcttcttgagattccatcctttgtatagcttgagagggtcacataggctatagagtgatcaacagcataccattcttttatccaagaataagatggagtaaatgtgtttagtttgaaaaaattcactttcagcctgtctttgccctctttaatgtttttgccctctttaatgtctttgccatctttcacgggacattaaccagcaaacaccccaaatgaagtaagtccttttcatgaacttttcaccatctgagaactcacacagggaagaaacctcagaaatatgatcacgtgaggaaagacttctggcctaactcagtcttatcttgagaggattcatactggaaaagttcttacattgagtattacatctaagagcttctgaaaccatgagaatataattgctgtgggaaaggttttatgcatagctcccttattcagcatcacagaagttgtactagagattacctgagaacatagggctgggaagccttcgggtgtcccagaactcactggcaaggatccctctctgaacacagcattttgggaaccccttcagtaggagtcctcattgttttcagcatcagaggactcatatgggcaaacatcctgtgaatgaaatctgtgcagacaaatgaccagccttaactctcaccttatgtgacagaacgaaaaaaatatacactgaaaagaaccccgttgaataataaaaatgaaatgtctcatcctatttttatatcatgtcgtagagaaggcaaaccctacataaaacactgataagtatataaatgtagtcttgtctcttctaatttgcttattatctgacctgaacatctagaacaaatatttaaaatatggatgagagcaggtgttcttttacttctgtatgtccccatttgctaacacaatgactgaattactaggaactcagtacataacgttgagtgaatagatgtctgaagaagttgcaggagacaagaatatgtcttcaaagagaagactgaatacaaggccaggctttgaaacaaaagggtaggtaagagagggtaaaggaaaatcttgagagagtgctacaaagaactctgcggggcccacattcttggcaactaggttgagtctggaatgttgggtggctgtcaaacatgttttggctggaattcagtgaagcagagtcatttcatgctttgtgatcttttattgaagaacactttacattctctgccacctcccacatatctgatctctaagacctgtgtaaatcgtgatcctcttatctggggatcactctccctgtgttctagggcttgtactcagggataacttcaaagtctgaaatgtcttaagtagtaattaagaaggaaaacaaacgaactaagtgtttgaagcagacatttttggggggaaagaaaaataccatcaacagtcctatagaaagaggaacaatggctttaagaaaaaaaaagaagaataaatgagtcagaaatagagaagaaaaaaatattccaagagctcattttctggataggcagaatgccaaaatgactttgagtaagtaaagaataaataaccaaccagtaaacctatacaggggaaaagaacctgtacagatattttacatgtagtttttagttacagtagtttgcacagctgttacaaagaatgagcaacctctttatgtattgatttgaaaccacatgtgtgtacttaaagtatatgacattttaatatataaatatacataaactatttcttaaaatttaagtgtgcttgctttggcttcacatatactaaaattggaacagtacagaagatgagcataaaaatttaaaaataacaaaatacatagtcaagtgcgaacacacaaacatggttgtgtgtcagttgatcatcagtggaaagacatggagacttctttggaattttatattaattttcggaggtgctgcccataactgtgatcatatggaaatggtagctccttcctgttgtgtcactgcttcctggtccagttcctgacacagtataggtgctcagtaattatttgttgagtgtaggaatgaacaaacaaaacatggaaagatttttggaaaagtgtagagttgccaaaattagtcctaggagaaatattaaaattaactttgacttttttttttttttttttttagaacaaattgaccacttgcatctgagtactgccctgagcagtggagattttttaacttcccattaaagacagggatgggtgcagtggctcacccatctcagcaccttgggagggtgaagtgggagaattgctggagccaggaattggagaccaccccgggcagcatagcaattcctggtctctacaaaaaatttaaaaattagccatgtgtgctggggtgcgcacctctgaaatactattaaaatgatactatttggctgggcacggtggctcagtcctgtaatgctggcactttgggaggccgaggcaggtggatcacctgaggtcaggagtttgagaccagcctggcaaacatgtcaaaaccctgtctctactaaaactacaaaaaatagccaggtgtggtggtgggcgcctgtaatcccagctacttaggaggttgagacaggagaattgattgaacccgggaggcggaggttgcagtgagccgagattgtgccactacacttcagcctgggcgacagagcaagactctgtctaaaaaaaaaaagattcagcaaaatgacattacaaaataaattcatagtaatagcttggcttggccaggtatggtggctcacacctgtactggagtggctcaatcccgatactttgggaggccaaggtgaatggatcacttgaggccaggagttcaagaccagcctggccaacatggtgaaactctgtctctactaaaaatacaaaaacttagccgggcgtggtggcgtgcacctgtaattcgggaggctgaggcatgagaattgcttgaactcaggagttggatgttgccatgagcagagatcgcactactgcagtccagcctggcttatggtgcgagattccatctcaaaaagaaagaaaaagctttggtttacaccaggaatatcaaatttgacatggatatacaaaatacattaatacctttaaaaagttataccaaagaataaattattaaagaatgagcaggacctatttgaagaaagttgtaagtgctggagtgtggaagacttgataaatagaagtattaacttattttgagggcttaaaaaggctagaagtactgatgtccttttcctgagtcctgaagtcattctagccatcaacctctggagaaatgctgctggggccattttaccatgggaccagaaatacaagtccctgacatgggcttggctgagaagaagcaagtggggtgcaaactatgtgtgctttcatgttgcaaagaagctgtgttgaatcaacaaatattacttgagcacttgccaggattccaggtactgttccagggctggatcacagtgatgagtggggcaggtcttacacctgctttcattgggcctacatccattccatggctgattggatcaacaaaaatgaagttgcccattcagtacctcaattgcactgggcacctttcaactgctcattggccctgcagctaatgctactatgttggacagtacagatctagaacatctcatttatagaaagttccattggacagcactgctctagatagggtgatagacatgataaattaatgaatcagatatttgggatggtaatgagtgttggaaagagaaggaaacaatgggatacattggtgggggacaagcgaggtacgggtgggcagcagtagttcagaactaagtaggaagatggttctgaggaggtgacgtttgagctcagacctgaatgggaaaggcgaaccaggtgaagatgttggggaaggtgaaccaggcgaagatgttggggaagactataccaggcaggagggtggtgcacatgtggatctctggatgaaaggccatattctaggaaaactaagatggtggctgtgggagacccctttagcgtcaaggacatgaaataacagggtttggaacccggctcctttgttgcccactatgttaggccgttcttaaattgctgtaaatacctgagactgggttatttatgaagataagagatttaattggctcacagttctgcaggctgtacaagggtggcactggcatctggttggcttctggggaggcctcagggagctttttactcatggtggaaggcagggagcaggcacatcatgggaaaagcagcagccagagagaggaagaaggtgccgcatactgttgtttgtttgttttgtttttttttttggagacacggtctcactctcacctaggcggtagtacagtggtgcgatcatgacccactgcagcctcgacttcctgagttcaagcgattctcccacctcagcttcctgagtagccaggactacaggcacatgccgctacgcctggctaatttttttttttttttttttttgtggagatggggttttgccatgttgcccaggccggtctagaactcctgggctcaagcgaaccacctacctcagcctcccaaggtgctgggattacaggcgtgagccattctgcccggccacacttttttaaacaaccagatctcgtgtgattaacttaaccaccaggaggatggtgctaagccattcttgaaggttcaccaggccccacctccaacacagcatcacttttcaacctgagatttggtagggacacagaaccaaaccggatcatccactctgcaaccctgggcagggttcctagcctatcccagcatgaatttcttttttttttttttctttctgagatggagtcttgcactgtcgcccaggctggagtgcagtggtgtgatcttagctcactgtaacctccacctcctgggttcaagtgattctcctgcctcagcctcccaggtagctgggactacaggtgcccgccacctcgcctagctaacttttgtgtttttagtagagacggggtttcaccatattggccaggctggtctcaaactcctgaccttgtgatctgcccacctcggcctcccaaagtgctgggattacaggcatgagtcaccgcaccaggcatatttcttttgtgtatggtgtacatttgcttcctgggactgtgggcagccttcgtgaaatgatggtactgtcattgattcaaaaactgagtaacgtaaagatgatcagcagcctttggcagatcctctacttaggggtgtgagatccacaagtcccagttggcagcctcagtggtacactggaggagacagatgcagaaggtaatccaacagggagcttaggggcactgagggaatgatgagagagaacaggagagctgagagctttccagacaaggaggaaaagtgatggggtactgtgcccagggattaggggagctgagggtaagtactcttctgacttttcccccacaagctgctaaaaagatcattgcttttcgttatattttggactggtatacctggctaatcagcattcactggcaaacagcactgtgaggaagacagctgcctaaggcctgtttgtcaccctggaagggaagcagcagagaggtagaagtatcctgagagaagaaaatagtgtcaagagggagaaagcagcagctcccatcaagcccttaccacatgctgtgcctggactttggtatctcatcactttgggtgaagaaactcaggctcaagaagttaatctctcttgattaaaccccttgctttgagcctcagtgaatttgtttcacaacccattagacagacagttgtaggtgaggtgactacattgctacgggctcattcagttgctggactgaaagccatttggagctccagctgatagggattatgcagctccacatgagtgggttgggtcagtcatgtctgtggaatgagatgggtggaatgagaatccagttccacctctgcctggtggtgaacttaagagcttccattttctcctccatgaagtggagcagctaatttcctgcaatagacagtggtaaggattgccctaaaggtcttgggatagtctatgggttgacatttggaggactgaggtgcacagaatgagtccatcacttcctcaccagtttctgggtttgtggtctctctgttcactgtggtgtccttggttccacagcatgcaaaaggtgctttatgataactgtgtacagaacagagtgtggggcctcatgggttaataataaagattaaagcagaagtaagtacattagaaaggggtggggtggagtagaagaatccaacagttgttttcctaggggccaaggcatgaaaatccctcgattaaggaatacaaaaatgaaattttagaaatttatgaagtaacgtttaagatgtttaagtgtcatgcatggttacctaaaatagtactggtggcccagtgctggtctgccacttagcccccccccaggaagtacagattcagttggtgcatgtcccatgtcctaggcacttagtccggtgctgctgggcctccagtaaatcttatccccagctgcttctcaggaaaaattcaagccttaagagctgtaattgggctgggcacggtggctcacacctgtaatcccagcactttgggaggccgagatggacggatcacctgaggtgaggagttcgagaccagcctggccaagatggcgaaaccctgtctctactaaaaatacaaaaattagctgggcctggcggtgggcgcctgtaatcccagctgcggctgaggcaggagaattgcttgaacccgggaggcggaggttgcagtgagccgagatccctccactgcactctagcgtgggcgactaagagcgaaactccgtctcaaaaaaaaaaaaaaaaagaaaaaaacgctgtaattgaaagaaaataaatgaagtatgctttcaaattaagaaaagttacttggggcgaagtaagtccccagaagtcctaagaaacagaaagggaattaaatacagatcagagcacttataaatgagttggagaggccaagcccccaaaatgaaaatacctcaaaagcttatttgggggaagaggttggaattaggtgcacaagtgtgtctgattaatcttatcaagaagaaaaatcacttcaagcgtagactggtaatggtcgaaaatttaaagcgtggctcaggtcgtgatctacaattgcgccacctcgctggaaggacggcctgggctgcgagaaggcagcgcgggcactggctctgggcagatcccagcgcggagctgactccctgggcccgtgccagcggtgggcacctccagccaaacctgtgcagcgcgcaaacgggaagcccagacagaccagggtttgtactcgaggaacgggagaggggaggggttgggagccgtctgctgtggcctcagcggaacgtctaccccagcccgcgaggtccggagaaataccttcaggtggggcaggcgtggaaactcctgccgcactgccccgttgccccatgtaggcccaggacgtgtccctgtcagcggggactagggagaacggtaccggaagcccgtgtctcggaggctgctgggagctgtaggccccgcgggtgtcgtagttctgggcgcttttccgggtccagggggggcagggttcgaggcgtggcctagaggcgttgtaggcgtcgacccatttcgtcggctgagagactgggtcttgtgtggacggtgctattctgggcgaaagggttagcttatggttgtggcctcgcattcctgagtgcgcgatgacggactcggcgggtgcgtgagagaccagggccgaggaggggtctgtgcaggcggcttccgggctctgaaagatgcttccgcccgagcttttttatttttaacgtagctgcagctattgcacactagtaattttctgctctgcgaccgtttttctgcgctgtaataatcacgctaaaagtagtgcaggttttactgcttacaagggagtttttaacaattttcttaaactgtgttacaacactacccgttcttccagttttgtcctaacaccgcgcggggcaggaatattccaggtatgttgtggaaataaagaccaggccgtccagatgaggacacccagaggttgactcagagccgggtatagtagggagccagccacggtcccttgtgttctgtagagagagtcaaaggcaggtagggagtgagaagacgtgcattcataaggaagggttctgagtggagaaccctattggcttggcggggagcagtaaaagggtatattggcagtcatctaagtcctgagctgtgcttgttgccagaggttgtgggtcagtgctgtgttaactatatttggtttggctgttgtgtttttattcattcctttggtgcctctatacctatcttcatctccgaatagctccagtagattcatcccgtgaaagtagctgtggttccttgctgtggctttgctagttcatgctgagctacttcctggtagaattgtgctgaccatttatattcacaacagcaagggtgaaattgcaggtttgctcttgtcgttgccactaaatattacaaatatcaaaagtaagtcataatctgtagttatttatacttttatatttgtttttaaggccttattttttagggacaatatcaggcttggtagccaaggctggagtgcagtggtgcaatcatagataactgtaaaatcaaattattgggcccaagcagccctcctgcctccaagtagctaggaccacaggtgtatgccatcacacctgattaatttaaacttttttagagacagggtctcactatgttgcccaggctggtctcaagctcctggcgtgaagcgaatctcctgcctcagcctcccaaagtgcagggatcacaggtgtgagccaccccgctggccaaattatttagaattagcattttgaaggggagttttagagagctttcttgtttcctcttgttttgtgctgcctcctcagcatttcaggacagtcctggagttcagtttagcaatgtgctcttgtggactctgtgccaggacccagagcccctgcctttcccatatatcctcgttcttgtccccagtggaggttggagaaggttctttttcctgtgaccatgcatacatgtacagtgtcacagatcccttctcaaccctcattgccttttgttctttccctataacagctctatggagatataattcacacattgtaaagttcactcttgtaaagtgtacagttcagtgtttttaaatatattcacagggttgtacagctgtcactactgtctaattccagaacattttcttcacccaagaaagaaaccgcatacccattagcagtctcccaccaatcctctcaatttctccatttcctaacaattactaatctacttgtctgtctgtggatttttatattctggacatttcatataatatgtggccttttgtgtctggcttcttttacttagcatgatgttttcaagtttcacctgtgttgtagcatatattagtagtacttcattcctttttattgccaatatttcattatatgactagatcacaatttgcttatacatccctcagttgatagacaatgggttatttgtacttgttggctattatggataacactttggtgaacattcttatagaagtttttggggacatatgctttcaattttcttagctatatatacttggggggaatgtctgggtcatggataactatgtgtttaacttctgaggatttaccaacctgttttgcagagtggtacagcattttatgttcccaccaacagtgtgtgagcattctagtttttccacatcctctcctgttatcatctgtctttggtaacagccatgctagtgggtttgaagcatattccactgtggttttgacttgcatttccctagtgaataatggcgttgagcatcttttcatgtgcttgttctcatttgtcttgctctgcttttgacttacagagtatcctgagctccagctggaccctaaattggatcctcttcctgctgagagtcccctaatgaacattgaggttgttgaggtcctcacactgaaccaggaggtggctggtccccggaatgcccagatccaggccctatatgctgaagatggaagcctgagtgcagatgcccccagtgagcaggtccaacagcagggcaagcatccaggtgaccctgaggccgcgcgccagaggttccggcagttccgttataaggacatgacaggtccccgggaggccctggaccagctccgagagctgtgtcaccagtggctacagcctaaggcacgctccaaggagcagatcctggagctgctggtgctggagcagttcctaggtgcactgcctgtgaagctccggacatgggtggaatcgcagcacccagagaactgccaagaggtggtggccctggtagagggtgtgacctggatgtctgaggaggaaggtaagtagaagggtgggtagagggacagcttaatgagggtgtcttggagtaccctgtgggggagataagaactccaggcttcctaggaaggtcatgggaaggattgtgtccgctccatacagaccaaggacatccatgttgcccacgtgttcctgagtcagagccactgaaacccttgcattctttagcccttcgtgggcttctgatggaagcacacagatgaagtgcttcatttttatccctctggcatccctgctgcaccataagccctgtagcacttgataagatagatgggaatactgagctcagagagcccgcagtagcaggagagacagggatttgacaaatgagaatgcatagaaaaatgctgggactatgaggagctcgaggtgatggtgaggcttatgaaggtctgcagctgacacctggtgtggagtggaacttggccagggtaaagaaagggggcaggaaagatgtgccatgcagaggggagcactgcctgtaagggccaagatggaagggatcacagtaaatgcaaaactcagaaaaatcggttatgtttgtgatggaagggagcagaggttggagctggcactgccagtggggactttagtcctaaagcaaagcaaaatgttcttctaaaacagtagggctcgatccctgagttccagaaactggtggcaccactggatttgacctttagagatttaccaggctgcatgtgtggtggatggtggacagaggatgggggcgaggctggacacaggctacccgcagctattgccatgccctctgatggggtggtgtcttggataggagtgatggtgatgtctgactggggagagactacacgtgtggagtgtgtatttgggaataagactgcaagacttggtttcttcatcaggctgagtttcacagagcgtgcatgcttctgcattgctcacctccattttccacatttcacgggtgcccagaagatgtttctgatgtgaacgaatgattgactggttgatgtttgtgattgcaggaaaggggaaggtatcctgcagggggatggtgggattctaagaggccagggcatcctggagatcgggtatccgaggcagcagggcaggcacttgcatgagttgtgtcagatgcaccaagtctggggtgctgtacttggcagaataattgccccaaaggtgtccatgtcctgactcctggaccctgtgaataagttgcctcacatgacaaaggggactttgcagaaacaattaaggatcttgagagggagagatgcactggattatttgagtggatctaacataaccacaggggcccttaggagagggaggctggagggtcagaggagatgtaatgataggagcagctgatagaggaagaagccataagccaaatgtttggggcagcctctagaagctggaaaaggcaaggaatggattctcccttggagcctccaaaaggaacatagccatgctgacaccttcattttagcccagtgaggcacaaaccagacttctcatctccagaaccataaggtaatacatttgcattaatctgagccgctggcattgtggcaattcactataacagcaataggaaactagttagttaggtgccaaggagacagttgtggggttaatgaggtgaaagtcagtgaattcaccctgtgtttaacctcaggggtgaataaaataaattagtgccacagaagacaatgggaagaggctttccagagaaccctgagaatctcacattatgtgatcagtgtgttagttgggacgcttgagtgtgactgctgcaaagccttgcacagaatggctcaagggagaaggagaatttattggaaaagttccagggtgctcgagcatcaggcagggctggacccaggagctccaatagtgtcctccagacttgtcctgtccctcattcttacctcttctgccctccactggcttcatcatgggcaggctgtctccctgcatgggatttctctttcccaaatgttccaactaaggccttgttggctccaatcatctggctataggctgtgttcatcccagatctaatcactgtggccaagagaaagggatggtccagtgtgccagcctaagtcatcttgtggcccaccttgatggtgggggtagattagcattgtggaagcctgtggaccatttggggtcatgtgaggaaggttagaatgaaggagccgtggttacaggggcccttgggccaggtggagctgttgttttcttaggtggaggagacttggtgacgttcacctcaagatggctgcatttcatgggtccagggaaagtctcaccttccatgaggtgggaggagagagggaagaaggaagaggtgcccaaataggcagggtgcagggcttggaggccggaaacaggggctttgactctaaggagggggcgtcagtcagctgcctcacaggaggggctggggccctcagcagcccccggaaagggaaggagtgggaccagagtctcagcagtgaggacactggtgccctgtgacccttggagggtgagccatcccgggcccatccaggtgtgggcactcgggcacgtgctgtgaggggagcagagctggtgggaagggaggacaggagcagaggctgtcatggagccacagtacgatgcaggggtgcggtggccccatgggttgcagagaggccacccttgccctgcctaagggtccccacacctgctgacctcctctggctggtgtctcctcccagtacttcctgcaggacaacctgccgagggcaccacctgctgcctcgaggtcactgcccagcaggaggagaagcaggaggatgcagccatctgcccagtgacagtgctccctgaggtaagcggggagtatcaccctgttttggtcacagcatctcctgtgaggcaggcccacccctgaggcatccactctgccctgggctttcctaagacctcccacaggctgggacattctgagattctgagctcttaggtctgtgctgaagcaatctgagtatgaagagcagccctgccctccagccactgtggcatcactggagacaacgcatggtgacccgggagctgagaaagcaggaggcaagagggaagggactaagtgtttacagagacttgagaggtggaactaccacaggcaggcacatctgtatccaggtcagaacaagagagccctcaaccttcagaaatgcatacttaggtatttatctttggtatctgggatttgcttcagaataacccagagctggggtgtgggtgaaaaagattggtcctgatgcgctgaccactggggtagtggtatgtatgtgtcattggtcagacctgtttgcactgcaaatggcttatactggctcaagcgtagaagtcaatttattggctctcatgtattctctggtaggcttcaggcaaggctgcatccaggtgctcccaggtgatgggaagaatctctggccaacctgtttcatggctctgctttctcccctttcttcttctttttttttgagatggagtttcactcttgttgcccaggctggagtgcaatggcgcgatctcagctcactgcaacctctgcctcccaggttcaagtgattctcctgtctcagcctcctgagtagctgggattacagacagctgccactacacccggctaatttttggtatttttaatagagacggggtttcaccatgttggccaggctggtctcgaactcctgacctcaggtgatccacccgccttggcctcccaatgtgctgggattataggtgtgagccactgcgcgtggccactcccctttcttcttaggcagattctgccccatgtaagcaaaatgcctcagatcctggcaaagcagcgttgggggtacctcttcttcccaaagtcctggtcagttccccagaaaggaccagtcatggctgtgccagggtgactgccctcccccaggtcagccctgtcgacaaaggcaggggcttggttgtcatttccaccaagtgggaagacagtattaatagatggagaaccctctgcagtgggaagatttcagcaatgggcaagctggatagagccgtggttaggatggagttgtttgcttgttgcacttggagctctttatgaagcaagggctctgcctcccagcctgagacccagaccctggtttggacccagtagaactcttgtgggccctgggttggtgtctctgagcaaatccccaaagcaggagagtccctagcaccgtgagctctgtcagaacctcccagctggcctttcttctgccctcattgacaaccctctgaccctcttgctgagcatagacacatatgtgatgttacaggagccagtgaccttccaggatgtggctgtggacttcagccgggaggagtgggggctgctgggcccgacacagaggaccgagtaccgcgatgtgatgctggagacctttgggcacctggtctctgtgggtaaggctgtgccccctcttcacccacctcagggctggtaggccacaggagccccaagtcaggggtgttcaccttctctagactccacactgggcattccctcaaggggcccttgctgcatccagggcctgtaagtggaactgtagacctagaggggtgaggtcactgggtggccagaagcagccttaggtccggtgaaggagtgatttgctatctatctcctgagggagtatgagagaacaggaactcgaagagctcggaggacactccctgcccttcctgtcccttgttcaccaaggtcagtgctcccctccctgccgcttcattgcttttcagtctctctccaggttgcatgactctatttgggagaaaaaaaaaatcctgacttttgaacttaattatgcatttcatgctctcagacccatcccagcacatctctctatgggatccacatcttttgtttatttttttcagggtgggagactacactggaaaataaagagttagctccaaattctgacattcctgaggaagaaccagcccccagcctgaaagtacaagaatcctcaagggattgtgccttgtcctctacattagaagataccttgcagggtggggtccaggaagtccaagacacagtgttgaagcagatggagtctgctcaggaaaaagaccttcctcagaagaagcactttgacaaccgtgagtcccaggcaaacagtggtgctcttgacacaaaccaagtttcgctccagaaaattgacaaccctgagtcccaggcaaacagtggcgctcttgacacaaaccaagttttgctccacaaaattcctcctagaaaacgattgcgcaaacgtgactcacaagttaaaagtatgaaacataattcacgtgtaaaaattcatcagaagagctgtgaaaggcaaaaggccaaggaaggcaatggttgtaggaaaaccttcagtcggagtactaaacagattacgtttataagaattcacaaggggagccaagtttgccgatgcagtgaatgtggtaaaatattccggaacccaagatacttttctgtgcataagaaaatccataccggagagaggccctatgtgtgtcaagactgtgggaaaggatttgttcagagctcttccctcacacagcatcagagagttcattctggagagagaccatttgaatgtcaggagtgtgggaggaccttcaatgatcgctcagccatctcccagcacctgaggactcacactggcgctaagccctacaagtgtcaggactgtggaaaagccttccgccagagctcccacctcatcagacatcagaggactcacaccggggagcgcccatatgcatgcaacaaatgtggaaaggccttcacccagagctcacaccttattgggcaccagagaacccacaataggacaaagcgaaagaagaaacagcctacctcatagctctcaagccagttgaagaaaccttgccttttcagcttgaccctgcaatataacatgcacaggcctgcttgtgaatcaggactgaatgtgaaagggaagtattgagtgaggacattcccaaaaccaaaggacaactgaggagactgcccagcacataatgaataaataagaaaatgagtgaggagttattaacatcatttggaaaaaagatttcccattcacttgatattgtttgttcactcatttagtcattaaaagtgagattaataaaatctgaaaatgttatataataactttaaaaagccaggtaattaataatctgcactgatattacatccacagtaccacagtatttatgtgtatgaattaaggattaaaagataatgtggataaataaactattgatctatgtctgtgtagaacctgtgtatttcctgcctgcttaaatatctctatagtaatgattaatatttaagcaacattaaaacacaaggaaggagatcatcagatagttctagaagattctgtgcaaggctgcagcaccttgggcacaagatactatgtgagttgggatgactgaatctttctgctccttagggggttgtcatgatatggttaggtggaggtaaggaaaatttaaacccaaagggctggaaaccccaggcaagtgtggggcttcctgggaatattcatgtttcttttgttatttttcgcacagaatctcatcctgtcacccaggtttgagtgcagaggtagaatcatagcttactgtagcctcgaacacctgggctcaaaggatcacctgggctcaaagatcctcctggctcagtctttcaagtagctgggactataggcatgcaccaccatgcctagcttcatttggtttgtgtttccatttttcctgagagactatcacaaggaaggcaactgctctggccaggagcccatcactaagttaagcaaaaagacactggcaatactagagcatgtacttgcccacagttcacattctttctccaggtcacatagcccacagtatatgacccgctccattccttgttctaggctccacctttgctcttgagttccatgtaacatttaacataaaactctggatcaaaaatacttaggttcaagacactggttgagtgctactctgcatagcctctttagaacccttgggtcttgccaacaagggtgaggtgcagtcgtgccatctaggatgagagtacctcctttctctgcagaagtgaaaaacccttggagacaggaccagagtagataccttgagcccatgtgcctggagaatgatggtggtacaccagcagccctattgccattcacacattgggcacagggcttgtggttgctatgttgcttctagtcatttcagcactttaatatggcacatgttagcttctttgagaacatacacagttgaagaacttgcccagggacgttagttggtaaaaacagcctcctcagctgttcagaactctacaatatcacctctcaagaatgaaccaaagaatgggacccttgagattagaacctggtaaactaaaaattcccagattccaaatcctagactgaggggtgagtccaaagttttagtgatggcttcaggaactgagatgatggtttgagctgggtctgggaaaataagggacccaggaataggaaagggggagaacatactagggtatgggagagctgattggaactacaaagtacaaggccagtgggtccattccaaggtatggaatggctcatctcatggctggcacctgggcttgaggtggctctaaggctgagttcagttgtgttaggttctctcatccaaagagccagggttccaacagtattaggcagaaacagcatggctttttctgacccagcctaggtcacatggtgtcaccccaggacagtctatcctttacaagccagtcactaaggccagccggattcagtgggaagggggttaaactccatctcttgaagggagagtaccaaggttaagaaaggcaggagagtgtggtggccaactctggttaaaaaggtctacaagtatgccagcatttacctttaaatactgtgtatccccacctgtgcttgcaagacaggaagaggaaggcagggagagaggctgcacatgtgggagctgacccactagacacaattattagatgtagtttaaatcctggctctgctcctcactgggtctgtgattgtcagaaagaagattaatgcctggagggtccacgttccatatatccagtacaccagtgaaaaggtacatgacgctgggcacagtggctcacgcctgtaatcccagaactctgggaggatcatctgaggccaggagttagagatcagcctggggaacatggcaagatcctgtctggaaaaaaaaaaaaaaaaaaaggccaggtgtggtgatgcacctgtagtcccagctactcaggaggctgaggtaggaggaatgctcgagcctaagagtttgaggctgcagtgagctatgatagcacctctgcactccagcctgtgtgggagtgagaccttgtctcaaaaataaatttaaaaattgtaaaaagaggttacaaagatgttagcttctttgagaacacatgcagttgaggaacttgcccagggatgttggtaaaaacagcctcttcagccattcagaactctacaatatcacctctcaagaatgaaccaaagagtgggaccaattaattccagcacatccacttatttgttcaacaagagtgtctgtatcatttaccaagaaggattaaaaagtaattttgttctctttgttcctttgtggctgatttttaatgcagagactatgtatcctggatctagccagttgagcaaactctgattaattttaataggttttactaaaatctggatttccatacttttaattttatgttaatctttgcatagttttcttctgaatacaaagtaacagaagatttgattttttaaaaatctctctttccaccatcctttggtgccgtcgtcaaggtgcggatgaatatcctgtctgatgttctcaagaggatcaacaatgctgaagagaggcaaaagacagattattactaggaggtgctccaaagacattctccggtttctaattgtgatgatgaagcatggttacattggtaaatttgacatcactgatgatcacagagctggggaaattgtcgtgaacctcacaggcatgttaaacaagtgtggaatgatcagccccagatttgatgtactcaaagttctagaaaaacggcagaataatctgcttccatcctgccagtttggtttcattgtactgacttcagccggcatcatggaccacgaagcagcaagacaaaaatacacaaaagggaaaatcctgggattctttttctaggggtgtaatgcttacaaaaaaaaatgcctccgtggactacagtgcatccaaaaacaaaataactgacatttgtaccacacaaaagttaccctccaatagtgtgatctttctttcttaaggtgtaaaaccacactcggggttgtggtatttgatgctgtgcgaaattttaccttccctcgcagctcgcgagaatttgcggggccattcagcatggccagcatgggtccgagtgaggagggtccatcctcattgcacaggctacggagtggctccccgggtactttccaaggccaggtctccacctcgaagtgcgtcaaaggctgcaggccctggggaggctgaccagggcccgagggaggacgacaagcggggacgttggcggaggggttaatggcggagtcgcgatccagccgagcccacaactctgggaggctggttctgcctctctcccgaagcgtcgcccggctaagcttcgagcaccaggacacacaaccgccgactattccagagcccacagtcggcttcacgctggaggccggaaacgacacgtccccaaagcccgcgcgcgcggcccgccagaactgacctacccaatcaccgcaccgctgcgatcaagcggcgacacacgttgccgggtaagagtcacgctttggcaaataagcaacctgcctcatccaatcagcgtctcgcctgcccggttagttccttgtcttgcccaaccagattcttgcctcctccataccgctacttgcgtgtgccggtgcctggcccaatcagcgtcttgcgcctcttctcgctcccgggcctggtggaaacagactcagggccattttggctacacctgggagcagggcaccctggcggctggctgcggccgctgcagagatgaatggccccggatctgtggaggctcgcctgcccctggggaccccgtcctcggcctggggggtagtgtcaggtgtgtttgaaccagagcaattccatcttgaatagggactctctaaactaaggctaagaccggttgggctacattcccagtaagttaaggcattcttagtcacaggatgagataggaggtcggtacaagatacaggtcataaaaaccttgccgataaaacagcttgcaataaagaagccgcccaaaacccaccaaaaccaagatagcgatgagagtgacctctggtcgtcctcgctgctacactctcaccagggccatgacagttacaaatgccatggcaacgtcaggaagttaccctatatggtctaaaaaggggaggcgtgaataatccacccgatgtttagcatatcattaagaaataaccataaaaatgggcaaccagcagtcctcggggctgctctgtctatggagtagccattctttattcctttactttcctaataaacttgctttcactttatggactggacttgaattctttcttgcatgagatccacaaaccctctcttgagatctggatcgggactccctttccggtaacagtgagagcccagactggagacaggtggtcacaggctcctaggggattggggccctagggagccgttggtctgtgcaaccgccaggccccgcccgggtctcctcattaggctcaggcgcacaagcgctgagctggcctggtcctcaatcacaggtgagaagcatcccgttcccaccttgggaatggcccagcgcctgccggtcctagacgcccagcctggcctggccacggactcttggtgaagggttgggctgcgcatcactcagctgtggtagtggtgatgatggtaggggtgctgggggactcgagctgtgtcctgagcagaaacttgaaagaaatgtgagtagctctgccgggaccacgcatctctaggcacgcccggcagggggaatatcgagatgcttactacaccagtttgtgttttgccatatccaggatcctcagtcttatttgctgaataataatttttattatttacttatttactttttgataaggagtctcactctgtcgcccaggctggagtgcagtggcgccatgtcggctcgctgcaagctccgcctgccgggttcacgccattctcctgcctcagcctccggagtagctgggactacaggcgcccgccacgacgccctgctaatttttttttttttttttaagtagagacggggtttcaccgtgttagccaggatggtctggatctcctgacctcgtgatctgcccgcctcagcctcccaaagtgctgggattacaggcgtgagccaccgcgcccggcctgctgaataatttttttaaatccatgcgttaaaattcaaaatttataaactgatttaaaagggatcatttgggtcgcgccctgtgggtcaggcctgtaatcccagcactttgggaggcccagacgggtgaatcgcttgagcccaggagttcgagatcagcctgggcaacacagcaagactgcatatctgggaaaaaaaaatgctgggcatggtggcacacacctgtagtcctagctacttgggaggatcgcttgagcccaggagttggctgctgcagtaagctgtgattgtaccgctgcactccagcctggccagcagagggagaccttgtctcaaaaaaagaggggtgggggggtggggccttttggttatttacttgccaaaataaacgtgagttaaatacagttggttaaaggcccagcgcagtggctcacacctgtaattctaaaactttgggaggctgaggtgggtggatcactcgaggtcaggagttcgagaccagcctgggcaacctggagaaatccgttctctaccaaaaatacaaacattagccaggcacacctgtagtcccaactactcagaatcctgaggcaggagaatcccttgaacacaggaggcagaggttgcactgatccgagatcatgccactgcactccaggctggacaacagagtgagtgagactccatctcaaaatcatcatcattatcatcatctacaaggggaaaatggcagaagttaagacaattttgaacaggaagaacaatgtacggaatgtcttaccaaaatgaaagtgtgtattgttaagctgaagtaattaaaactgtgaccctggagcagacagagacagagcaatgcaacaaagctatgtagagatggcatttgtggcatatgataaagcagccatttttaagttatccagaaaagagggaatgttctgaaaatgtgctgggagagtatatagttgtctggaagaaaattaagtcagacctccatcataccatacagaaagttaaatttcagagggatgaaagaacatagggccaggcacagtggctcatgcctgtaatcccagcacttcgggaggctgaggcgcgggcagatcacctgaggtcaggagttcgagataagcctggccaacatggtgaaacgccatctctactaaaaatacaaagattaaccgggtgtgctggcagacgtctgtaatcacagctgctcggggggctgagacaggagaattgcttgaacccgggaggcagaggttgcagtgagccaagatcacaacactgcagtccagcctaggtgatggagcaacactctgtcttaaaaaaaaaaaaaaaagagccaagcgtggtggctcatgcctgtaaccccagcactttaggaggccaaggtgggcagatcacctgagatcaagagttcgagaccagcctggccaacatggcaaaaccccatctctactaaaagtacaaaaattagccaggcgtggtggtgggtgcctgtaatcccagctactcaggaggctgaggcaggagaattgcttgaacccgggaggcggaagttgcagtgagctgagatggagtcactgcactccagcctgggcgacaagagtgagactccgtctcaaaaaaaaaaacaaaaaaaaaatcacactcaacaatttatcaaaaggatgacagtatatttaaactcaggaatgcaagaatgcttcaggccgggcatggtggctcacacctgtaatcccagaactttgggaggccgaggcaggtggatcacgaggtcaggagatcgagaccatccttgctaacatggtgaaaccccatctctactaaaaatacaaaaaatacaaaaaattagctgggcgtggtggtgggcgcctgtagtcccagctactgaggcagcagaatggcgtgaacccggcaggcggagcttgcagtgagccaagattgcgccactgcactccagcctgggtgacagagcgagactccgtctcacaaaaaaaaaaaaaaaaaaaaaagaaaatgatttaaaagatcaaaaggaaaaataaatgcttatgacagtctgacagccaagaaaattataatcaaaataacagtcaaggaaccggccttgcttgatattaaaatgtcattataatctcaacagaatggtattatattattatttatttgtttgtttatgtatttatttttgagacggagtctcgctctgtcgcccaggctggagtgcagtggcacgatctcggctcactgcaagctctgcctcccgggttcacgccattctcctgcctcagcctcccgagtagctgggactacaggtgcccgccactatgcccagctaattttttgtatttttagtagagacggggtttcactgtgttagccaggatggtctcgatctcctgacctcgtgatccacccgcctcggcctcccaaagtgctgggattacaggagtgagccaccgtgcccggcctattgatttatttttttgacacggagtctcactccctcacccaggctggagtgcaatggcgcgatcttggctcactacaacccccgcctcccggattcaagcgattctcctgcctcagcgtccccagtagttgggattacaggcgtccgccaccactcccggctacagaatggtattattataagaattgacaaatggatgtgtggaagaaaaatgatagcttatttgaaaagtgattttgggagaattctagctttcccagtaagctgatgcctgcatcagacctcaaacaaaagtaattcctaatagactaatgatttgtatgtttttaaaattttttttatattttgagatggagtcttgctctgtcacccaggctggaatgcagtgccgagatcttggctcactgcaacctctgcctcccaggttcaagcgattctccccgctcagccccactagtagctgggattacaggcgcgtggcataatgccctggctaatttttgtatttttagtagagacagggtctcaccatgttggccaggctgttctcaaactcctgacctcaagctatccacccgccctggcttcctaaagtgctgggattacaggcttgagtcaccgcacctggccagatttgcatgttttaaaaagtgcaaaagaaaatttagaagactacataaacataaaatctgtggcttgcaatactttttaaagcaagacaaaaaactcagatctattcataaaggaagagtagacaacatactttacataaaaagaatttttttttttttcgagacaaagtcttgttctgtcacctaggctggagtgcagtggtgcaatctcggctcactgcaacctctgcctcctgagttcaaacgattctcatgcctcacccgcctgagtcgctgggattacaggcatgcaccgccaggcctggctgatgattgtatttttagtagagatggattttgccatgttggccaggctgtcttgaactggcctcaagtgattctcttgcctgagcttcccaaagtgctgagattacaagcatgagccactgcatctggcctaaaaagaattttttgtatgctaaaatagataccataaatttaaaaagagaataaactatgtattgagaaaaatatttgttacacaaatgacagacgagattaacattgataaactatcatgaacgcctataaagtgccaaaaaagaaaaaaatattaattagacaaaacacagaaaacaaaacctcaaataaccagtaagaatatgtaaagatcctgaaatcacaagtagctagggaatacaaattacacaaaatgttacttttacccaaaatactggcaaaatacaaaggataatacccaatgctggaaagaatagggactattattctcactttggaaagtaatttggtaatacctaagagaatcaaaaatacacttatccttcaacttgtgcagtcccactggaggggctctgacctatagaaatgaaggcactaattctgggtgtccgggggtgtttactacagtattgtttatgttgtgtttggaaatagagaagagtgtgggaggtgaatgctaggattttacactgaaagaggtgcagatgagggggaagaagtaggctggagcaaattgaaagtgatgtctgctataattagttaagagaaaatatgaatgtaaggttcaatgtatgaagtttttttttttctttttctttttttttttttttttttagacagtcttgccctgttgcccaggctggaatgcaatggcatgaccttggctcactgcaacctctgcctcccagattcaatcaattctcctgcctcagcctcccgagtagctgagcctcccgccaccatgcctggctaattgttgtatttttagtagagacagggtttcaccgcgttggtcaggctggtcttgaactcctgaccttgtggtctgcccacttcagcctctcaaagtgctggaattacaggcgtgagctactgagcccagccacaaggtatgaagtttttctagacatgtaaaagtgagcatgcacttgggcaaaaacgagagtcatccaaaaatgaaaacataagatttaatttcaggatgggagtctatgtcatcttctatttgaattttctgttatttcctgagttccaacttttttccactccagataattcatactataatatttccataaacctggctcacagaataaaagtttgaaaaataagtttatttcaataatcattagaaaaattatagtcgggcacggtggctcatgccggtaatcccagcactttgggaggccgaggctggcagatcacgaggtcagggattcgagaccagctgatcaacatagtgaaaccccgactctactaaaagtacaaaaattagcagggcgtggtggtgcgcgcccataatcccagctactcaggaggctgaggaaggagaattgcttgaacctgggaggcagaggttgcagtgagccaagatcgcaccactgcactccagcctgggcgacagaacgagactctgtctcaaaaaaaaaaattatggaagtgaaaaattgtgcaaaaatgagtgtgtaccaactttctgtcagagcttcaccttaatcatctaataagaaagcaaacaaaagataaactgtataagcatgccaacaataatctttatttctgccatgttttaccctttaatattcagaagaaaagtcatacaggaggaaaattttataactatagtaaatatagacaacttgaacaacactagatctctactggccaaaaggaaaaaacaaaaaacaacccccagtatatccctaaatgtacaccagagaatcttaaaagataaaataatttggccaggcacggtggctcccgcctgtaatctcagcactttgggaggccgaggtgggcggatcacgaggtcaggagatcgagaccatcctggctaacacggtgaaattccatctgtactaaaaatacaaaaacaaaattagccaggcatagtggcgggggtctgtaatcccagctactccagaggctgaagcaggagagtggcatgaacccaggaggcggaacttgcagtgagcagagatcgcaccactgcactacagcctgggcaacaaagcaagactcaaaaaaaaaaataaaataattcatgtgattataataaatttgagaaaaacttcttttatagctcttgcctttctcaaagggggaggactcatcctggagagaaaccccatggatgtattcaacatggtaaatctttttgatggagctctcacctagttgcacatcacaacttataccagatagaaaatttatgaatgtaatcaatgtggaaagtttttcagcctggtgctcccaccttgttagacgtatactgaagactctgggaacatcgggaacgtcagagagctttcagcaggagatctcatctaattgggcaatagaaaactcatactgaagaaaaacaattccatgtaatcaatgtgagaaatatttcagtgacatccttgattttaattggcatcagggaaagtgtaatagagagaagccttatgaatgtagtcaaggtaggaaatctttctatacagctctggccttgttgcacataaaataactcatactggaaagaagcttcgtgactgtaatcagtgttggaaatggttcagttagagttctcacttgttgctcatcagataaatcataccggtgagaaactgcgagtgtcctgagtgtaggaaatcagctggagctgattacttatatggcatcagagatttcacattagagagaaacctcatgaatgtcactggtgtggaaaatcccgcagcaagaattctcaccttattgaacagcaaataactcattctggagagaagcctataaatgtagtcaacgtggaaaaactttcagacagaattattattgtgtatgcaccaaaaaattcatatgggcaaaagccaacatgaatgtctaaatgtgaaaaagccttcaggagactatctgaccttatggaacaccagatcattcataatagagagaaactgtatgcatataatcagtgcagaaaggcctttcaggcagcattctaatcatgtcaggcaccagataactcattcttgagtcaaactgttaatgaactttttatttattttattttatttttgagatggagtctcgctctgttgcccaggctggagtgcagtggcgtgatctcggctcactgcaagctccgcctcctgggttcacgtcattctcctgcctcagcctcccaagtagctgggactacaggtgcccgccaccatgcccggctaattttttgtattttttttttgagatggagtctccctgttgcccaggctggagtgtggtgacacaatctcagctcactgcaacctccacctcccgggttcaagctattctcctgcctcagcctcccgagtagcagggattacagacacacaccaccatgcccagctaatttttttgtatttttagtagagacggggtttcaccatgatggccaagctggttttgaactcctgacctcaagtgatccgcccgcctcggcctcccaaagtgctaggattacaggcgtgagccaccgtgcccggcctaattttttgtattttttagtggcgacggggtttcaccatgttagccaggatggtctcgatcttctgacctcgtgatccacctgccttggcctcccaaagtgctgggattacaggcgtgagcgaccgcacctggccaatgaactttttaaattgagacagggtttcactctgtcatccaggctggagtatagtggcaagatcatcactccctgcagcctcaacctcttggtctcaagtgatcttccaacctcagcctcccaaagttctggggttacaggtgtgaggcattgtgcccagccataacttttaaaagattttcttcccttttatttagacatcaaggtaaaagtaactttttttttttttttttttgagtcagaggcaggctggaggagtgcagtggcaccatctcggctcactgcaacctccacctcctgggctcaagccattctcctgtctcagcctcctgagtagctgggattacaggtgcccaccaccacacctggctagtttttgtatttttagtagagacagggtttcgccatgttggccaggctgaccttgcactcatgacctcaggtgattcacctgtctcagcctcccaaagtgctggaattacaggcataagccactgtgcccagccaaaggtaacatttttaatgtaacaatatatggtcattctttgctcttatgacacaatcctacaaaaggcgatcactaagcttaagcactaagcctaaaactgaataatataaacactgatgtagggaaagttgttcctcagacgactccattattgatacagacatggaaacagtaaacagaaatgtaacatcaaagttcttatttacttgaactttttttttttttgagacggagtctccctctgttgcccaggctagagtgcagtggcgtgatcttggctcactgcaagctccgcctcctgggttcagggccattctcctgcctcagcctcccaaggagctgggactacaggctcccgccaccacgcccggctaattttttgtattttttgtagagacggggtttcaccatgttaaccaggatggtctcgatctcctgacttcgtgatcggcctgcctcagcctcccaaagtgctgggattacaggcgtgagccaccactcctggcctgaaattttctataataaaaacaaacaagatcatttattatctcataatgaaaagtccctgaggtgagcataggcaatgttgattcagtggcacaaagaggattcattccatcatggatactggttctttccatttttctgctgtgccattctcagcatgttgcctttacctcctggggtggcttcctcatggtgccagtgtgcttgtaattgtcctacacatcacatacagacatcacggtccaggggcaaaagaagacacattgctatcttatgtccacttttaagactgagggaaccggccgggagcggtggctcatgcctgtaatgccagcactttgggaggccgaggcgggtggatcatgaggtcaggagatcgagaccatcctggctaacagggagaaacaccgtctctactaaaaaagaaaaattacaaaaaattagccgggcgtggtggcgggcgcctgtagtcccagctactcgggaggctgaggcaggagaaaggcgtgaacccggaaggcggagagtgccgtgggcctagatcgtaccactgcactccagcctggtggacagagcgagactccgtctcacaaaaaaaaaaaaaaaaaaaaaaaaaaaaaaagactgagggaaccttcccaggaaacccctagcagccttatttctccttggccagaatatccttgcctaattcacacagcaagaagcttgagtccattctgattagcttagaatccatcaagatcctcccttagggagttagattctagatttcccggaagaatctaaaaattgcagggtcgtgctagccaggtatgaaaataagcaagtaaaaagatgatgactgttgggtaaagctatcgacaaggtcagctacaaaacagtcaagccaaggaaggctagtcacagatgcaccccagacacaaaagcacagtccaggagctgagggtgcctgagccacagtggttcccgcctacctggccttcgtaggaaagtttcctgtggtctccctcattgaagagccaggacgggtcaggcggtggtgggtctcagacattgagccccacaacgcactgagactgaacatcagaccatttataataacagaactctgtcccacaacttctgcagcaataggtacaaaacagaacttggtcactgccagcctccctatttttttccctgtcccacttaggagctaccacagaaagccaaataggctcgactgagcgatcacctaggacgaatcgcctccagttagcgtgcttccaccttccactcggaatgctccaagcagggcactcccggggctttgtttctatcactaggacgcgtccccacgcccaggctgtccctgagtccctgccacaggcgcagatgttggcgggcgcccttgcccctgagctcccggttaacggccttggactgttctcatggctcagtcttggtctctctccccagcagggcaaggcgccgggaaggcacccgagatgacagcgccgagccccataggcgctagtcccgccctggacgccgaccgccgcctccacagtctcggcttcggttgctggatgagaaccagcgtggcccgtttaagggggaggggacaggcgctgcaaggagcagagccgcgggaagcaactccctaagccacaatgctagtcgcgaacacaggaaaaagctcatcccgccgccgcggggccccatgctcccgccggcaatgactatgcctgtgggagcaacggctaccggcgcgcggccttctgggagttgtttgttgcgcggagcgcgggcacgtccgccggccaccggaagcaccgccattggccggtgcgtgcaggtgagtctggcggcctcaaggttggctcggaggtttcactgttagccgggtgcggccggagcgcaggaccaggccagagccgccccaagtgatctgggcgtgccggagaaacgagcagggcctgcgggggtccctcatgcggcgaggccgagcaagggcaggggcctgatgggatcgggatctctccggcctcagggacggggaaggccggtccagtcaggtttcccctgcaggagcgcccggctgggtctgagcttgtcgggaggctctcctgctgcagagctgggagggaacttatagtacctcgcaggtacgggcaggggtggaactgggtgggactgggtgggactgggtgggactgggtgggactgggtgggccctcccgacagagggtgcctgggtcgagggctgcaggggcgggggattcaggctggcgtctggagctctggggctgccgacccagcgggcctctcccggctcctttttcctccctcaactcatcttctgcggcttatccacaggtggcagccaagagcctcctggcacagcggcaccaggcaggtgacgcctattggaccccagaggtcatcccagctccagacgtggacacattttcttccaatggtacgtgaagcttgaaccttgcagagaacatgtgtattttccaagtgaacagaagattaaggccagtccacgcagggcaggggtaactggggtgttgggggcctgcactggttaagcgatgctggtgcaccccatagagagactacagaggtgaacaggatgggatgtgtatgtaacgcctgtaagttagggatcggggttccatttgtgttgggtgatatttgatggggaccgtacaaggcagtgctaatgaggaaggcatggggttggatttcaagagtctaagggagtagggaaacatctgattgtggaaatgactccgtgtaaggagggatgccaaaagacaggaaggagtggaggaagactgtgtttctgtttccagcgtggagccagggtagaagtcacagtgcaaggaagatgtggtatgcctggtcagtctctgcatgggagttgaggagcatgtgggtgacatggctgaatgtggaggagggaatggcagtggcaggaagcccaggaggtttgggctggacacgtaacctggagcagattggaaacgtcaccccacaagcagggaaggagaaaactggaaaaggaaagagaaagcaactccctccccagccctgcagccagagggacttctgccagatcagccaccatacaggtccagtatgaggaacagatggggaattttatgtccaagtataatcactatgaatacatgtgttgtgccccttttgcaggttaacacaatgttaagctctgtaaatgcaactcaattaattcttttagcatcctcacaaggcaggtcttgctgtttttccagatgtctacggatgaggaaactgaggcctggagaggttaaagagacccgttcagagtcctacagtggcaggtaatggagccagtactttgacagcaggttgcaaagtgagtgttctcagccgttgcccttggatgcctccagacaaggaaggacagggttagagagcaaagatggacacaggcagtgagagattccccagggaaggccaggagcatcaggacaagatagtaacacataagatattgggcagacctcttggatgtggtctacatttgtgtttgtgtgtgtgtttgggagtgagagagcagagcaggatgggcaagatgaggagggggaaactgagagtgttggtcactctgttcaggcctcacctgagaggagaagaggcagggggtggggcactgggatatggattcatcttgaccagggagaagacatctcagctcagaatttgaagggagctactaatgagtgcaggcctgcaggagtttgtgtgccaggaggttgaaagagtccagagtcatcccttggagtgaattaaaaggccgatttgtctgcacagagaggacagtggtgggaggggactgaagtagggtgtgagagcatgagctcgcagctgtaaggggatagtgactgagtggatactggtgttcctgaactcctataccacccagaactcagaaactagcagggttgggcagagagggcagtcaagggcataggcagattgcacagaacaaacagatcagagaggccaagaggtgggcctcaggccaaggatgttaagaaaaagaacaggggcattgggctgggctggggtggggtgtaccagacggggaggctgggagcctgagtggtagtgtgcttagggccatgagctatggagctcccaccttctcactccccagccacgaggcctcagttaaattttactcaagttctttctgccttggtttcctcatttagaaagcagggtaaattctgttaattgtctttgtggggttacaaggaagatcaaatgcatgaattcaggcagaggacagggtacagtgcctggcctgtaggaagtacagcctgagtggtcagtggattttgaaaggtaggaaggcctggggcatttgctagggaaggaagctgagatcataggccccggtgtgttttaattcatgtctttattatttatttttttataaatggggtctcacatgttgcccaggcttgtctcgaacttctagcctcaagagagcctcctgccttggcctcacaaagtgctgggattatatgtctttaatacagagcagctttgtacatttttcagccatgtagtttattttattgtgaactatctgtttgtgactgtcacctctctttttcgtaggtctctattttcattaaagaagcttaaatattttgtcaagttcaaaaaatagtcctggtgtgttttttgttttgttttgtttttttcttgagacaaggtcttgctctgtcacctaggctggaatggtggcatgacctcggctcactgcagtctccgcctcctgggttcaagcgattcttgtgcctcagcctcccaagttactgggattacagatgtgtgccgccacgcccagctaattttttttttttttagtatagacagggtttctccatgttgtccaggctggtcttgaacttgaaaactaatacaaaatataatatgtaatgccagaaataagactagttctcacagtaaatgtgatgggtagaactctgttttagtagacactttgaaattgaactgaaaataaaaagttaaagatacgctctacttagaagagtcagatgatccaggctttgacaaacaggtggtgggatgagcatagatccatcagtgaaaacaaataaggaaatgggtggcaagataatatcagataaagtagacctttagtgcaacagcattaagacaattttatctttttttttttttttttttttttgagacagggtctcactctgtcacccagactggagtgcagtgatgccatcacagctcactgcagccttgacctcccggctcaagtgatcctcccacctcagccttctcagtagctgggactacaagtgtacaccactacacccagctaactttttgatttttttgtagagacttggtctcacttagttgtccaagctagtctccaacttctaggctcaagcagtcttcctgctttgacctctgtattagtctgttctcatgctaataaagacatatccgggccgggcgcggtggctcacgcctgtaatcccagcactttgggaggccgaggcggccggatcacaaggtcaggagattgagaccatcctggctaacatggggaaaccccgtctctactaaaaaaaaaaaaaaaaaaaaaaatacaaaaaattagctgggcgtgatggcgggagcctgtagtcccagctactctggaggctgaggcaggagaatggcatgaacctgggaggcggagcttgcagtgagccgagatcgtgccactgcactccagcctgggcgacagagagagactccatctcaaaaaaaaaaaaaaaaaaaaaaagacatacccaagactgggtaatttataaaggaaagaggtttaattgactcacagttccacatagctggggaggtctcacaatcatggcggaaggcgaaggagaagcaaagtcacaccttgcatggcagcaggcaagagggtgtgtgcaggggagctcctctttgtaaaagcgtcagatctcgtgaaactgtcataagaacagcaaggaaaagacctgcccccatgactcagttaccttccactgagtccctcccacaacatgacacgtgggaattatgggagctacaattcaagaggagatataggtggggacactgccaaccacatcagcctccaaaagtgctgggattacaggcatgattacaggattaaggcctggccttatcacctctttagtgataaaaggctataggaacaagatacattaatcttgaatgtttatggaccagacaccatagcatagatataaagcaaaaattgtgtacttaaaggaaatatgagaaggactatatgagaaacttcaacacatgtcttagaatttgatcaggaagacaaaatagagtataataaattattttaagtatggtgtcaaggtaggttatagatttatctacacacttctgtctgtaatatattctgcccacagaaaatttaaagacccagattttcttctgtgtacacaaggcccctcctatattagatctgtaaatcattgaattcccttggtcctgagtcctgttccctctctgtaacttgattgttcctgtttagtttaagtgctgctgagtctcatggacttaaatatctttactgtggtgccccagtatcttctctgggcttcaggctggcaaacgtaactgcctgtgtaacattcccacttggaaattgtgtccagccttaacatgtcttgattcccctcctcctacttgttcactctgggaaaagatataaactttcccaagttcttgaatctagaaagagatgtcattatttagcctccactcccaattctattgcataactgattatacttccaatgtaaagaatgaatctgcccacttctctccattttgctgtcccttgagtcctggcctttggtgatagccacttcttctcctcattccacctttactccccacagtccactctccagcctgccaacatctacataagcccagcaatgccttctctctctctgagatagaatctaaacttgtatgggactttctctagctgtggcccttgcctttctctatgctcaggtcacgggatgggccagggtcgttccagtctctggggtgaggtttccaatctgcctcagcttctgcctgtgcattggggtgcctcccttcccttaacctcatcttgtgggcctagaactgttgtctttccttgatcccatgctgactgcacttcattgttgttgcctgtttgctcatgtggcctccctgctacctgggaaaaggccccacaggccagggttgtgcccttgctgggtctgggtcccacttacatccctggcctggagcctggcacttggagtgagcccagagttaatcatcgttgatggtgacactgctgcttttcctctcttactgtgttaggatagctcaaggagcagttcttccctttgcctgtgtacctgcgtgcagcattctgcgagctgtctggcaattctgcttttgaatatttaacctaaacatacacatgcagaaagggaggcatgtatgaaagcaagagtggccattatagggctgatgtgagggtgaaatttggaaaactcctaaatattcagaaacattaaactctttaaagctgggactattaataaactacagtccattcatcaaattcagctattacagtgattacagctattacaaaaattgtttattggcattgggagatactttacaatgctaagtttcaaaagagtgtttacattataatcacatttttctagaaatgcattatggtgattagtgaacatgtgtgtattgacacaggaagatttctctctctttttgttgttttttgtttgtttgttttaaggaagatttctcaaaggacatgcagttaccagtccataataatggggatatgttccgaaatgtgtcgttaggtgactttgttgtgtgaacatcatcagtgtgcttacacagacctacatggttatagtctaatacacatacaagttatgtggtacagcctcttgctgctaggctgcaaagctacacagcgtgttattgtagtgaatactattggcaactataacacaatggtgagaatttgtatatgtaaatatatctaaacatagaaaaggtacggtaaaaatatggtataaaagataaaaaatggcccacctgtatagggtagctccattgtaatcatatgggaccactatcatatctgcggtctgtcactgaccagaacgtcattatggggcacatgacggtaggcacaaaatagtaacagtggctgtctcttaagatgttggattatttattattgttacttttagctatttacatctttgactttttatgcaattaacctaaaatgtgtgtgatttatacatcgtggtggctatagttaataatctcttatatgcttgaaaattgctaagaaagtaaaatattcccaccacaaaaaagtatgtgaatgcatatgttaattacctcaatttagccattctatagtgcatatgtatttctaaatatattgtacatgacaaatatatacagtttgtatttgtcaattaaaaaataaattaactttaaaatttgtgtgattaaaaaacaacttcataggccgggcttgatggctcatgcctgtaatctcagcactttgggaggctgaggcaggtggatcacttgaggtcgggagtttgagaccagcctgaccaacatggagaaaccctgtctctactagaaatacaaaattagccagacatggtggcacatgcctgtaatcccagctactcgggaggctgaggcaggagaatcgcttgaacccaggaggtggaggttgcagtgagccgagatcatgccattgcactccagcctgggtaacaagagtgaaactctgtctcaaaaaaaaaacaaaaaaacaacttcatgtctgggcatagtggctcatgcctgtaatcccagcactttgggaggccaaggcaggtggattgcttgagcccaagagtttgagaccagcctgggcaacatgatgaaaccccatctctattttgaaaacagaaacagccaggcacggtgactcacgcaatgctagcactttgggaggccgaggcgggcagatcacctgaggtcgggagttcaagaccagcctaaccaacatggagaaaccccgtctctgcttaaaatacaaaattagccagggtggtggcgcatacctgtaatcccagctactcggaggctgaggcaggagaatcgcttgaaccctggaggcggaggttgcagtgagccgagatcgcttggcgccattgcactccagcctgggcaacaagagtgaaactgtgtctcaaaaaaaaaaaaaaagaaagaaaacagaaacaaacaaacaaaaagccatcattttgagatatatacttataggaagctgcaaaatagtacagagtatcttgtgtgcccttcacccagcttttccagagagtgacatctttcacaagccagacattgacatcgatacatattgttacttagactgtagaccttatttagcatttttaagcctccatttgtgtgtatgtatcattctgtgaaactttttttttttttttaagacagagtctctctccattgcccaggctggagtgcagtggcgggatctcagctcactgcaacctccattccccgggttcaaacaattctcgtgcctcagcctcccaagtagctgagactacaggtgcgcgccaccatgcccagctaattttttgtatttttagtagacagggtttcaccatgttaaccaggctggtcttgatctcctgacctcaagtgatccacacgcctcggccttcctaagtgctgggattacggaagtgagccaccacacctggcctcattctatgaaactttttacctttttttttttttttttccccacatagggttttactctgtcacccaggctggagtgcagcggtgtgatcttggctcactgcagcgtctgttcccaggctccagcaatcttcccgcctcagcctcccaggtagctgggactacaggtgtgcgccaccacacctggctaatttttgtattttttgtagagacggggttttgccatgttgcctaggcttgtcttgatctcctcggctcaagcagtccgcctgcctctgctgcccagagtttacaggtatgagccaccacgcctggcctcaagcttctgttcatcttaagccaacaattttgtggaaattggttacaggggccacaagacactgagccgctccaggccggcagcttgctggtcctggcagcctctgcgagtgctgtggctctgatttcatcttggggcctagtgttaggcacagcctggcctggagggcggctcacctcacgggctgacggagccagacccttgccccgccagcggtccgaggggcccttccagctacaggtaggaccctcacacccaccttctttttgctttttttccccactcatccatggagacttccaagctgctttttatcttccctgtcttcctcatattttccttttgtgtcttaaatgctgttggagtgcagcagacaccccagtgtgtgacctgtgccagaagcctggagctttgttggcatggccagtattcggcatggaggcagggcctggggaggcagcaaggtgcggagccacccgaggatagagaagcctgaaaatgcgtctggaggtggggtgttgtggggccggggagctggaaggtgttccatgagactgacagacgtcacaaggtctgtggggagtgtctggagatttttaaaacttctcttgttgctcagactggagtgcaatggcacgatctcagctcactgcaacctctgcctcctgggttcaagtgattctcctgcctcagcctcctgagtagctgggattacagacgtgcaccaccacgcccggctaattttgtatttttggtagagacggggtttcaccatgttggtcaggctggtcttgaactcctgacctcaggtgatccaccagccttggcctcccagagtgctgggattacaggtgtgagttaccacgcctggctgagatttttaatctgggaagggatatctggagattgtggaggaatttgggctttctcctaagggcagcgaaaagctggcactccacagggttctgtgacacaggcttcattctgtggtgtccctgcggcttcctgggagagaggagaaaagtcaaaggcaggaccccatcaaacccaccgtggtaacccgcacaagaaacagtggctgagccaggcatggggcaggcttgtggagcggtgcatagtgcctggaagacggggacacagggttttggctgaatgtgaggagagcacgcaggaggcgtcaggaaggacttcccctctcactgctcagtacacgtgtgagcatcgatgtcacaggcttccaggcagaggagtgcgtacgtgagggtctgctgtgcgctcagtacagagtgggtgtgggtttctggctcaggagcctcccgttgttgtcacttctcctcctctgtctctggtcctcccacctccctcattgtagggatcattgtggtgaccccaacagtctccccatctaaagatcctcaacgtgggtctttcctttccatgtagggtcacatattcacaggttgtagggattaggatatggccatcattcaacccactaagtcacggtaaaaaaaaaaaaaaaattacaatgccctgatcagcatgcaaagggacaggcagaacagggaggggacacaggacacaggtttggtggcatcagggtgagtttcttctccttgtgcaggggaggcaagagtgttcagcatttgctgttagtgtgtcctgactggcctctgagttctccttcgcgttcaggaagagaaggtggtgaaaataaacagggctgggtgctctgtggctgcaggttttcttcacatctgctgatgtgtgaggttggcctcaggcttaagagtcctgtgcctgacacaggcttgcccgcaaggttcttcctccctgtaaagccatttctcagctcagcacagtcagcatttggggccagatcatcctctagggctgccccatgagctgtagaatgttttacaccttcctggcctctgcccaccagattgcagccagtagctgtccccttctacacctcttcccccctccactcccaccaaactctggaaactgtcttcaaacatggccaatgttcccggaaagcaaaactgcccccagttgaggacctctgctgtgaagaaatggcccacttttcttgaaattcctgaaggcctgtttctttaagtaagcctggtgttcactgtgtgcgggtccttgagaccattctcaggttgaccagatggactcagaactctgaaaagctcttatattcacagttacagtttagtacattgaaaagatacagattaaaattacaaggccaggcatggtggctcatgcctataatcccagcactttgggaggccggggtgggcggatcgcccgaggtcaggagtttgagcccagcctggccaacatggtaaaaccccgtctttactaaaaatacaaaaattagccaggtgtggtggcttgcacttgtagtcccagttacttgggaggctgagacaggagaatcgcttgaacccaggagactgaggttgcagtgacccaagattgcgccactacactccagcctgggcaacagagcaagactccatctcaaaaaaaaaaaaaaaattacagtggtcaaaggcacgcatgtaaacgggagtccgggagagaccaggaccagcattcagctcattcagctcccagtggagttgcgtagacagtgcttaattctccaaacgaccatgtggaccaggaagctcacccaagccttggtgcttaggtttctttattgagggatgtgttatgtaggcatggagcctatataaattactttggttactcaggccctccagagatccccctaatacaccatggcccagtgcccctggcaggcagagacattttaacaggcgggatatcccaagggctcagaggttacagccagtcaaggatcagacctttctttttctttctttttttttttttggagacagagttttgctctgtcgcccaggctggagtgcagtggcctgatctctgctcactgcaagctccgcctcccgggttcacgccattctcctgcctcaacttcccgagtagctggcactacaggcacccaccaccacgcccgtctaattttttgtatttttagtagagatggggtttcatcatgttagccaggatggtctctatctcctgacctcgtgatctgcacacctcagcctcccaaagtgctgggattataggcatgacttgaggtcaggagtttgagaccagcctggacaacatcctgaaaccccgcttctgcttaaaaaatacaaaaattagctgggcattgtgatgcgcgcctgtgatcccagctactcaagaggctgaggcaggagaatcgcttgaacctgggaggcggaggttgcagtgagctgagatcgtgctaccacactccagcctgggcaacagagtgaaactccatctcaaaaaaaaaaagaaagtacagggtgtggacaacccaggcttactaaaccagccctgcacattccctgtaatgtgtgtgtgatgtggcagtgtgaacattccagtatcatggaatgatgggtttagcatttacctttttggggtaggggtcatttttttctttttctttttctccttctgtttctctttctccttctcttttcttttctttttgttattgttgttgtttgagacagggtctcattctgtcaccgaggctggagtgtggtggcacgatcactactcactgcaatctcaacctcctgggctcaagcaatcatcctgcctcagtctctcaagaacttgggaccacaggcatgcaccaccatggccagccaatttaaaatatatatatatatttaaatatatatatatatatatttttttttttttgtagagatagggtctcactgtgttgcccaggcagttctcgaactcctgggctcaaacgatgcttccgccttggcctcccaaaatgttgggattacaggcgtgagccaatgtgcctggcccactttgttcttttgagtaagtttaatgttgggagtcaggtaaatgtgtacatacaccaactctgtcttgcaagttgaatattttgtcataacttatgttatactttaaaccttttttggtagggtgtgaatgcctcctccccaaacttgtcatctgatagcaattctaatcattcacattccatttctttttttttttttttgaggtggagtctcgctctgtcacccaggctggagtgcagtagtgcgatctcagctcactgcaagctccgcctcctgggttcacgctattttcctgcttcggcctcctgagtagctgggactacaggcgcccgccaccacaccggctaatttttttgtattttttagtagagacagggtttcaccgtgttagccaagatggtctcgacctcctgacctcgtgatccgcccgcctcggcctcccaaagtgctgggattataggcatgagccaccacgcccagcctacattccatgtcttttgtgtatgttggtgccttgtctgtcctccccctggcactgaggtcgcatgcagttcttggcattgcgttgtctttgtcttctgtttcagcactgaatttgctgttcacttctctctctctctctctctctctttgtgcttgttcttggaggacttgagtgcttgatttgcctgaagaatgttatgtgtctgttcagaagagagattaggacctgcgaagctcatgcctagaggggagagtattcctgcagaattcagcgtaggaaaggaggcctcaggcaccagaagtgtttgagagcaggagagttctcagaagagattgcctgggaaatgagagcatcgctggggtgaagtcccagcagctgcgagtgttgaggctgctgtgaggtggcccatgcttaggctctgtgttcctggccagagtgagtccccagcaccgcaacatctgcaggagatgatgctggtggaagaggtttcccaagcctttgaagggaaaggtgagaactgcctaaaaaatacagcacagagaaagcaagatttctgcaattcatggcttgatacttgatattccagggaatttttttttttttgtctgagactatggggcaagaaaaatgccagcgttcaaacctgggagaatgataagtgttcagcgtctgcaggggctgcctttatctgctcttctagcccaaatgggagttgtttcgcttttttttttttgagacagggtcttgctctgttgcccaggctggagtccagtggtgtgatctcagctcactgcaaccttgacctctagggctcatgcgatcatctcatctcagcccctacccccaccagttgctgggacctcagaccatgcccggctaacgttttgtgttttctttgttttgttttgttttgttttgagacaatgtcttaccctgttgcccaggctggagtgcaggggtgcaatctcggctcactaaaacttcccgccccccgggttcaagggattctcctgcctcagccttctgggtagctgggattgcaggcacacgtcaccatgcctggctaatttttgtatttttagtagagacggtttcaccatcttggccaggctggtcttgaactcctgaccttgtgatctgcccgcctcagcctcccaaagtgctgggattacacgcgtgagccaccgcacctggctggctaacgtttttatagagaggggggtctcactttgttgcctaggctggtcttgaactcttggactcaagcagtctgcctgcttcagcctcccaaagtgttgggattcctggcctgagccaccatgctggcctttggggtcagagttcaaggctcttcatgaactagaaagcattgtgcaaatgaaaggcaccatcaggtcgagtgagcgtagtcatatgagcaaaggcagagatacaggatgcgcttctggaatgttcagtggtctcgagtaacctgttggtgcctgcagagggtgtgcttcagtgccgatgtggcgatgggagtcagatgtgtggaagggtttggtgccacattcaagagggtttttgccaaactctcggtaggacagtgatgtgactgctgcaaggggattagacaagcagaagatatgaagggtttggtgactgagttcagtagagagggtgacaggcatgccctggcagtaggcagcatcctggtacttccagctgagaccgagggagggcatccctgtacaacaccccctcccagagccgagggaagttccctgcgccgccctgctggggagtgtcacatcctccttgtccccacacccccattgtcatcatttctgaaaacagcttatgatccattgtgatatgctaaatgtacaattacttagacacctggcctccacctcccttccttagtcacgaaatgataggaaaaatgcccctccttgcccttgactgttgagggggctgctgcgtgtctggactcacagctgagacgcccagcacatgactgggcacatccccgagcctgaggtagcccaggtccccaggcgtgaggcccattcccgcacctgggaagccctgcttgtggccggccccgcgttctctagggtgggtgttggccctggaggtttgcaggagccgaggggctgaatctctgcttgttttccaccccagactggtcttctgaggacctctgccctctacacagcggcctcttcaggtgcagggaggaaatggaagcacgttctatgctggttccaccccaggtgagtggggggtctttgctctcagtgccttggtctccatagatgtaaaatgggtccaggaatagcacccgcccctgcaggctgtcacacaggagcgctccgcagtgctggccagtgcttcccagtgaaatgctccagctccctgcagtaaagcgcggcacccgtcaccagcatggacgagcctagagctccctgcactagacccagcgcaagtctcccatgcctgttccaccaggccaggtctgtgcttccgacattctgcttgtggttgctcctcaggcccttgagggtggatggagctagccccacaccccgacagccacactgggccctcaatcctcacggacacccctggctgggggagtgtccccttaaagcactgtagttacctacctgcagagtcccctgtaaatggtgagggccctctcttcctggcttgcagacagccgttgtccgactgtgtctttatgtagtgaggagagagagtgagagcacacatgccctttagtgtcttttcctcttcttattttattttttgacgtaggatctccctctattgcccaggctggagtgcagcggcatgatcttggctcacagcagccttgaactcctgggctcaagcgatcctcccacctcagcctctccagtatctgggactacaggcatgcaccagcatgcttgactaatttattatatttttagtggggacagggttttgccatgttgctcaggctggtctcaaactcctggactcaagagatgcttcagcctcggcctcccaaagtgctggaatcacaggcgtgagccaccatgcgcagcctcttcctcttcttataaggactctagtcctattggattagggtcccacccttgtgacttcatttaatcttaatcaccattttttttttttgaaacggagtctcgctctgttgcccaggctggagtgcagtggcacaatctcagctcactgcaactccgcctcctggtttcaagcaattctcctgcctcggcctcccaagtagctgggattacaggtgcccgccaccacacccagctaattttttgtagagatgggatttcaccatgttggccaggctggtttcgaactcctgacctcaagtaatccacccatctcggcctcccaaagtgttgggattacaggcatgaaccaccgcgcccgaccccctgtcaccttcttgaacagttcttaaacagttaaaattaatcaccttgtttgtggggttttttttttttttttcttttgagatggagtctcaccctgtcacccaggctggagtacaatggcgcgatctcagctcactgcaacctctgcctccaggttcaagcgattctcctgctgcagccaggaagagtagctgggattacaggcatgtgccaccatgcctggctaatttttgtatttttagtagagacggggtttcaccatgttggccaggctggtctcgaactcctgaccttgtgatctgcccgcctcggcctcccaaagtgctgggattacaggcgtgagccaccgtgcccggtcaatcaccttcttcaacagtcactttgggagttagggttcaacatgtgaattttgggaacacagtttattctatagcattagccttttgaaaacacaccacagccctgatttgtcctacaggctgcagttttcccaccccgatttagagtgtctttcttacctcatttcgaatctgtgatttttgtagagaggaagtgggtgaggatctcctagtggagttcctgtcatttccagtctagaaatcaggaccactgctgtgactggcaagaggtgagatgcccagaaaaggaatggtacagaccacatacatggagctgtcccagtccgtttgggttgctataataagataccttagagtgagcaatttacaaacaacagaattgactgctcatagttctggaggctggtaagtccaagatcaatgtgtcaacagagttggtctggttggggcctgctgtctcatagatggcacctcttacatgtcctcatatggtagaaggtgaacacaggctccctcaagcctcttttatgaggacattaattgccttgtaaagaccccacctcttaacactatctcactgggtattaggttccaatgtatgaattttacggggggacaccaacatttaggccttaacaggtacctccgtgagggcatgaggacctggggtctctgagcagtaacaagtgccctgtttcaggcatctgtgtgcttcgaggatgtggctatggcattcacacaggaggagtgggaacagctggacctggcccagaggacactgtaccgagaggtgacactggagacctgggagcatattgtctccctgggtaagtggctgtgctcatggaaggaggttctacccctaggactcaaagctgtaccaagttctgaagggtgttctgggatgtgctggaagatactggaagcaggtccctttcaggtgcagttcccaggggttgcccttcattctatctctgggacaggtttgtgacttgtagtcctaacagtggggagtttcctcgggacagcactaggggctgaagcttggacccaggacatggttcttggtgtccaagcagaggggcaagtcctttttccgtctttgaccagggcttttcctttccaaatctgatgtgatctctcagctggagcaagaagaggacctgtgcagggcagagcaggaggccccccgaggtaagagcagaccttgtggtgagcagctcaacgtttaacaagcttggacagagagctctccgcagggccccaggggccaaggagggagccttgtttggaggaagcctccttgggtgctctttgcagcagttcacccattcaaaggagttcaccaattcgaagtatgcagttcatggcttccagtgtcttccctgagtgtggaaccctcaccacaatcagttctagaacatgttcatcatcccaaccatttaggcctctttacttgatttgtttttttttaattaatgtatgtatttatttatttattttgagatagggttttactctgttgcccaggctgaagtgcagtggcgctgtcttggctcactatagcccccatctccctggctcaagcaattctcatgcgtcagcctccctagtagcttggactacaggtgcacactgccacacctggctaattcttttgtttttgtttttgttttttaagacggagtttcgctcttgttgcccagactggagtgcaatggcacaatctcggctcaccacaacctccacctcccaggttcaagtgattctcctgcctcagcctcccaagtagctgggattacaggcatgtccaccatgcccggctaattttttgtatttttagtggagacagagtttcaccgtgttagccaggatggtcttgatctcctgacctcatgatccgcccgcctcagcctcccaaagtgctgagattacaggtgtgagccatcacgcctggccctaattttgtatttttattagaggtggggtttctccatgttggtcaggctggtctcgaactcccgacctcaggtgatccacctgcctcagcctcccaaagtgccgggattacaggtatgagccactgcacctggccattaatttttgtatttttaatggagatagggtttcatcatgttgcccaggctaatagactttattttttagagcagttttaggtttataggtaagttgacgagaaagtgcagagttcccacccatgtctgctgtcctacagacacatgcagtgtctcctgctgttaacaacttggatttgtattgtacatctgttacaatcggcaaacctatcttgaggcatcctttttttttttcccagacagagtctcactctgtcaccaggctggcgtacagtggtgtgatctcagctcactgcaacctccgccccccaggttcaagtgattttcctgcctcaacctcccaactaactgggactacaggcacgcaccaccacgcccagctaatttttgtatttttagtagagtcagagtttcaccatgttggccaggatggtctcgatctcctgacctcatgatgcgcccccctcagcctcccaaagtgctgggattacaggcgtgagccactaccccttgcccttgaggcatcattatcacccaaagtccatagtttatgatagggttcatgcttttttttttctttttttttttttttttttgagacagtgatgcagtcatagcttaagccttctgggcttaagtgatcctcccacctctctgcaccccagcctcaggtgccacagcatgcaccaccatgcctggctaatgtaaaaattttttgtagagatggagtgtcactgtgttgcccaggcttgtcttgaactcctgggctcaagtgatcctcccacctcagcctcccaaagtgctgggattacatgtatgagccactgcacctggccaggcttcactcctgatgttgtatattctgtgcatttggacaaatgtacaatgtcatgtatccaccattatagtatcagacagagtagttccactaccctaaatattctctgtgctctacccattcatccctccctcatccccagcccctggtgttactggtggaggatgtgcaggttcttggcattttgaacaaagaattggacaaaatgcataaaacaatgaaagaatgaagcaaaaaaagcatagatttatcaaaatgaaagtacactccacacaatgggagtggtctggagcaagcagctcaagagcactggttacagaattttctggggtttaaatcccgagaggtttcccattggttacttggtttatatcctctgtaaatgaagtagtggcccataactagtctgattggttggggaaggtgaccaacagaggctgaagtgaagttacaaagttacacctctatgcagatgaaaactaggccagtgaccagtctcattggttgcaggaagaggtactttccatttttcatctgcgacacagaaggcgggggttgcctctgatccttttgttatttggggcatggaaagtttgggttttccttttgattcagttccaggaagtcagcattaatcacccttaggtttcttgcctccataccctgttctcatacctcatttccccccgaaagacatgatcctcataaatctttatgggaggtaaagggattgatagtctttcttctgtaactgctttatgctgacctgaggcacagtccctacgtactggggaatcacaggactctctccccgccctgtctagtggagacaggatagcttcttgatggccaggggtggtgtctccacctggaactggctggaaacattgtcacatgatcatctgaagcttgatggtctctaggtgacaggaaatgaatttggttaagagtttaacaaacatggtccaaaaaccaaggcaagtatagtcattactaatgggctggccagaggaaggagccatgaaccccaacttagcatttttgaccaggagccccatgactcagatagctgttgttgtattttagaggcccagttgggtagtttttgggtggcatttgttactaatcctcattgttcggcataaaaacagcattcttcctctagaaaaagacctaagcccccctttacagcagttaggagatctcatccccttctgttttgccaagcaactgctgctgaggcatctatttgatttcgtatggtgatgatactttggccaatgtctctattttttcttttttactttgggcaatgtcattcaagctttccataaaatccttggaaaagcattggtaataggatagggatgttacaacccggctgactcccattcccagtcccgcggttatttgtagtcctaccaaaagggatgtgagttggatggttcatttgtgtctggcaattgcagttaaaggtataatgagggattggttcttgggagctatattaatttcacaggctaaataaacaagtgtaaaggttctagtccaattggctggtaaacataagtaagaactagttccacacaggtaaaaggctcctagtttttcaagacaagaattttctatggtaaacatgtgggttagcttgttgttttcactttcccaagtggttaaggtccctatgaaggtggccccagttaaaggctggaaaggaccttgggaaatattctgagttgccccagcagttctgttttcccattggaggtaattaggcttagtgtctaccaacaagcatccagaggtgtttcgtactggggaaccaaaagataactagatgtctgaggattagtgcagtcttcccaagggaaaatatgatcatagctagtgggcttaccttggcagtacttagactgtgtatcctttgaagtgtccttatctagggatggtttccatgaaaaccatacaggttttctaaatgacacagtctgggtaactgcctagcttatgtaatcatgtgaggggttaataatctctagggtgtagttacactgatgacttttcaaggttcccagggcctgaccaaaattttggcttctcttaatacaaagtggcacctggaattttagctctgtgtacattgatattgggccccaaatgggtttctgtgggatgcaaccccagaaagggtactctgatagtactggagaaggtttactgcttgtcctgtcatcgtagttcatgtttttttccccaaggccaaagattgggctgggattggggtggtagtgtatttgaatgatgctggagataaccaaagccaacagtctttgccagagctgggctggtggtatttaactgtctttgagttaaatgtaaagtttttaataaatacccagaatccattaactgctggaggggtaaagtgaagctctgttgtaaaataaagctgattcccattatgcgtggtcctgtatacacaggctgtgggtgaccattatggaaccaaaaaatacttatttgttattttgtgctatagaataggaacttcaggggtggatacctatgctgtcaggaatgcttgttataagaattaattaaaacactttgcttaattattacaaaggaagttattccatttgtttagaagaaagcaattaaattgtagaagtataacaatggctactattatccagtttaaagtaactaagcaacaaagacaccaaggaaagttggtaggcttttacttatcttttggctgtcttttaaacaggtacttcaggtctttcacaagtcacaggtgtagtggctgatgggagcttcaggttcccggtctgggacttcacataacacaggcttgacaccagaaagatgtatccaactatctaatcctagtactttgaccccagaaggcatggccagtactgaaaatggtcccttccactttgattgtaattattgagcaggtgatccctccttctatgttttaacaggtaccttgtctgttggcctgattttgggttggtggttagttcctggtgtggggagcttttgagttccaaactcttgtaaagcctgctgaaataatcccaggttaactaggtattttactaaactggatgtttctggatcagagattagatcattagttaaaaatggccttttgtataacatttgtgtgggctcataataattttttctctaggggaattatggattcttaagagggctatgggcagtaagcagatccaagtttctgatgtttcctgacataggaactcctattttagagttagctaagctctttccacttttttggaggattgaggtctccatgctgaatgtaaataatagttgattctgagaaccttagcaaccccttgagttatttgggagacaaaagatgggctgttatcactttggaggctttgaggtaacccaaaccaggggattatttcctttaagagaacctttataacttcattaaacttctctgttctggtagggtacacttcaacccagccaataaaggtgtctgttagtactggcagaaacttttatcctttgcaagctggcatatcagtgaggtctaattgccagtcttcccctttaactttagccaatatattcacacacagaatcccttctacaattaatttttcataaaccttctacagcttgtcttttaaccctccaaactttggcaagaaatccatattctcatgccttttaccaaaagtacattctactttttttacatgaatccttttcacgacttacacagaccttctatgacatgcctggactttctgacttgtcctaaacatccctctttaaacaaccattcatttaactttagggcaagaatttaccatacaggatcctgtctcatacaaaattattattgctacatccttccctaccaagaatacatcttcatatacataactttcttcacctctctctcccgtacttactggtttcttactaccttgtttcataaataacccttttttttaagtcaacaacctgaatcaacctttagacaacctctgaactacacaaaatcatttctttcttaccaatagcacatcttttttggcaccttttgtatacagaatcatttgttaactagaattcttatccttagtaaccttaaattttagtgaaaccctaaaaagcaagaaatcctgaactattagatatgagcattttatagatgagaagaattccacaacttttagaaacatatttccccgtatcataatccttcctttttatttacttattatcattatgtttttgagacggagtcttgctctgtcaccaggctagagtgcagtggcacaatctcggctcactgcaacctctgactccctggttcaagcaattctccagcctcaacctcccgagtagctgggattacaggcacgtgccgccacacccagctcacttttatatttttagtagagacagggtttcaccatgttggccaggatgggctcgatttcctgaccttgtgatccacccaccttggcctcccaaagtgctgggattataggcgtgagccaccgcacccaacccataatcctttcttaattggaaatgacccagatatccaatgaacatcaaaaacaattttaagattttaagttacacaaagagtttacctaaaacatttatcccaatttcatttactcaattctttcattttaacattttatctagattacttctgaaaactaagatagtagacaccatcctctaaagttatttccttgttagccatttttttattaccaatgaatatcatttgctcactgaaaaaaagcctcaaagttaaatacacaggtatttttgccaataactcagaagattcagctaacaacattaaattagtctgatttgtttatttattttttgagacagagccttgctcttttgcccaggctggagtacagaggcacaatctcagctcactgcaaccttcatctcctgggttcaagtgattctcctgcatcagcctcctgagtagctgggacaacaggcatgcaccaccacatccagttaattttttttatttttagtagagatgggttttcactgtgttagccaagctggtctcgaactcctgacctcgggtgatctgcccaccttggcctcccaaagtgctgggattgcaggcactagccaccatgcccggccaaactagtctcatttgtcaaagaaagcatacaaaccaggaccattttttgttttggctgggttaatacctttataaccttctgtgccaaacactgacaccttaaaatatcttgcaaagacaaatataaaaccatatatgttgacaattctgaagacatttctattttcattttaccaataattttaaagccaacttctttagtaaagatttacttaagtcggctgggtgcggtggctcacgcctgtaatcccaggcaggcggatcacgaggtcaggagatcaagaccatcctggctaacatggtgaaaccccatctctactaaaaatacaaaaaattagccaggcctggtggcgggcacctgtagtcccagctacttgagaggctgaggcaggagaatggcgtgaacccgggaggcatagcttgcagtaagctgatatcacgacactgcactccagcctgggtgacagaacgagactccatctcaaaaaaaaaaaggaacagcagcacaaatgcctggatacatgcaactccatctcactttcccattcaacagcaaactccagattccaaacaatgttggggccaaacagtattgcaaaagaatatcaagtgtttcctccttagattatcagggtcaaatttattccagtcgttgaggatgcagccaagcagggagtcagatggaatagatggagtgtttcctattattgtctgtaagagagaaaatcctagggagggtgtagtactattcctcagaacctcagcctagggtgtcccctttggagaggttgaggtctggagttggatcccctagaggatccccctttggggtccaatcttagagtgtcagacatctctgactttaggtgggcaccagtgctgctttatatgttttccctccagtggcgatggtctactgtgagctttcctttggttcctgggcgtaatcccagacttttagtatcccactaatttcagtgtgatgtatcttcctgcattcctcacaggactaaggaggttctgaaacattgcagagttaatagtaccaaggttggtggggtattctctgtgaaggaaggatccagcggtatgtgaaagactgagattgagaatttctttctttcttttttttttttttttcttgagacagagtttttctttttttgagatggagtctcactctgtcgcccaggctggagtgcagtggcgcgatctcggctcactgcaagctccgcctcccgggttcacgccattctcctgcctcagcctcctgagtagctgggactacaggcgcccgccaccacgcacggctaattttttgtactttttagtagagatggggtttcaccatgttagccaggatggtctcgatctcctgacctcgtgatctacccgcctcagcctcccaaagtgctgggattacaggtgtgagccacagcgcccagccttagacggagttttggtcttgttgcccaggctggctggagtgcagtggcatgatctcgggtcactgcaacctccgcctcccgagttcaagcagttctcctgcctcagcctcctgagtagctggggattacaggcgtgtgccaccatgcccagccaatttttttgtatttttagtagagctgtggtttcaccatgttggccaggctggtctcaaactcctgacctcaggtgatccacccgccttggcctcccaaagtgcagagattacaggtgtgagccactgcacctggctggggttgagaatttctgtgagattcagggaaagcaaattgatgcagaagcaatgaccgtcaacctatgggatcccctcagtgaagtctgagatgtagaatgtctactgaagcttgtggatcccaaaggtcttcagacagtcaaatcgagtaagagaaggtaagtcaaatgcatgagatacattatcttttgcccttacaggctgactttaaggagaattttgcataagaaaagaggatttaagtcacctgaaatatgcgtgagttcgccctggatgagctgccgctgccagttgcatcacagatagggatcagggactgtaactggaaaatagagaaaagagtcttttccccttctgggcagggcagctatccccatttacgccttggccttcaggcaacaccagagggtggccctggccagctgccctcagttaccaaggaactagtaggaaacggcagctgaaagattttctgaaaaagagaaaaaggaaaaggactaaggtccttcacccgaactgggtggtagcggtcaggcacttccacacagaaatctttccgtttcaccagagagtggctccggccagaaacttacagttgcttgcatgcttatgtgctgtccaccaaggatccgtaagttggaaagggaaaaagagagagagaaaaggattcccctatatggaaaagggaaaacaaaaagagaaaagaaagaaatcccaaacctcgagcctacctcctggctggctcaccaaaatatgttaccagtggagggtgtctatgttcttggcattgtgttcttttacttttttttttttgagatggagtcttgttgtacccaagcgagttaaaaatacgccacactttgagacgaattaagagtccttaattaagccggcggccaaagagacggctaatgctcaaaattctctcggcctcgaggaaggggcttgattaacttttatacctaggtttaggaaggggagagggactcaaatgcaataagtctacagaagtaaaaacatgcaagaatcaacagaagcaaaatggttacagagagataaacaacttaaacggttacaagaagagcaacggtaccacgtgcaaggttctaaatctttcattataattagatatatagggtctatgccggacacaaactcaaggttttctgttgttatctctttgagaaaaatcctgggaacttcatacattgttggtgttagtgccttatcagttaattgggctcttttgaaatgctgaggatctgtttacccaggccaactccttaggaaagggggttgggtaaggagcccttagtgtcttgtaaattaaggggtcaattggagtttgtccggccttcccagctagagagagtcttatttacatgagaagcaaggctaggtgattaaagagacaagcaggacaaaattcaaagtaaccagttagagtaaaaacaagcttaggcatttcagtctcactctgttgcccaagctggagtgcagtggcacgatctctgctcactgcaagctccgcctcccaggttcacgccattctcctgcctgagcctcctgagtaggtgggactacaggcacccaccaccacgcccgtctaattttttgtatttttattagagacgggttttcaccatgttagccagtatggtctcgatctcctgacctcgtgatccacccgcctcggcctcccaaagtgctgggattacaggcatgagccaccacgcctggctggttcttggcatttttaacaaagaattggacgaaacacacaaagcaacaaaagaagcaacaaaagcatagctgtattgaaacaaaaatgcacttcacagagtgggagcaggcccaagcaaggctcaaaagcactggtcgcagaattttctggggtttaaataccctctagatgtttcccattggtcacttggtttacaccctatgaaatagtggcccatgaccagtctgattggttgtggaaggtgaccaagcagaggctgaagtgaagttacaaagttacgctctatgcagatgtctgactggttgcaggaggggaccaatccgaggcactttccatttttcatctgcaacacagaaagttggggggagttgcaaagggagtagcctctgatccttttgttacgtgggcatggaaatttagggttttccttttgattccgttcatgaagtcagcatgaatcagccttaggctccctgcccccagaccctattctcctgcctcactggcaaccactgatctttatcctgtctccatagttttgcctttttcagaatgtcatagttggggtcattcactacgtagccttttccgactggctgctttcactaagcaacatgcatcgtgtgtatcttcataccaccctctcacgtttcccccaggctggagatgttgagtttatctgaatttttctcgtgtcttcctgctcctccttccttgtaactctctcgcctgcagcctctgttatttcttcctctgaaggtgcacccaggcttacttatctaccctcctccctgggccatgccctgcacaccatacctcagtcatgtcatcctggattctgtttactgtcagtctttctgtttggcataggcatccctcttggctggcctgtgaggacagcccctttcctcatttcatgctcctaatggagaagccactgcaagatatttaatgtccttcacctgattttccatggccacgcaaaacctggacacaactcagccacccactgacttctttcctgcttctcatcctcaaatacccttcattgggctgttgtttcttttgaaaacatcctcccatgagggattccacagtgattccccagaggaaccacagagttgggatgaggacagtgcaagtgtgagagtgctgggtgtgagggcactgggtgtgagggcaccaggtgtgagggtgctggttgcgagggcaccaggtgtgagggtgctgggtgcgagggcaccaggtgtgagggtgctgggtgcgagggcaccaggtgtgagggtgctgggtgtgagggcaccaggtgtgagggtgctgggtgtgagggcaccaggtgtgagggtgctgggtgtgagggtgctgggtgtgagggcaccacgtgtgagagtgctgggtgtgagggcaccaggtgtgagggtgctgggtgcatgcaaggatcttgcccaggagggaagagagcttttgattgagaggagggaaacatcctctcagaagtcaagggatggccacagagtgtagttaatgtgttgccaaaggatccttgtgtcctcatgagctcagagagtgaggcatgagaacttgaggtaggccgcagtagtgttgaccgtggtggccatgcaaacataatgaacagagtgacaagcagagtggaggatctttaggacctggacaaggatcctgagctgggagcctctgccactcatttttagaggctccgtatcttcaacagagaggaatccccaccaggacaataacaaggatggcaagatcaaccatattttgtaatatcagtgccagacactgtgtgaggctcacatagtgattcattgatgcctcaaaataaatcttgtaggctaaacattcttactccgggctacagcaaggaaaatgaacctctaagaggctaaggacctgtctgaagtggcaaacggtggagcccagatgcagccagtcatgctgatcatgctgcttcagagaccatgcagtcttttctggagagtcttctattgggtcaattctggaatgcttaaataagtttttctctgtttgcagcctgaagaaatggtagaattggtgcattaagaatatgaagtcagtgttgatgtctgagatgcaattatgagatccagaagtggaacagaaactgatattctaggactaagcaccagttaggagtctgtgtttgcttcctgtggctgctgtaaaaaatttccaccaacctgttggcttaaaacaatgcaaatttattctctaaaagttctggaggccacaagtccaaaatcaatgtcactggatcaaaatcaaggtgttgatatggttgtgctccctctggatgctccaaatggaaaacacatttctgtcttttccttctcctgttggttgcagcattctttccagtcttcagatatcttctgctgtgtcttctcatcacctcctctgtgtttcaaatctccctctgcctttctcctataggaacacttgtgattacatttagagcccccctggatagtacagaaaaaaaatccccatttaaaaatttttagcagggtgtggtagcaggcacctgtaatcccagctactcaggaggctgaggcaggaggatcacttgaacctgggaggtggagttgcagttagccaagataatgccacttcacttcagcctgggcaacagagccaggctctgtctcaaaaataaacaaaacaaaataaaataaaaatactaatcacagaagggtacattggcttggctgtaatcccagcactttgggaggccagtcggggaggatcacaagagcccaggagtttgaggctgcagtgagccatgattgtgctgttatccggtctgttcaacagagcaagatcctgactgtagaaaactaagtaaataataataataaaattctaatcacatctggacagttcctttttcccaaaagttcacattcacagagtccaggggcttagaacatacatactttttgcaatggttaatggctttatatcctgcagacccagttcattctgtggatttctctttttatcttcacctccctgcttattctcttttttgagacagggtctcactctctcacccagactggaatgcagtggcccgatcttggttcactgcaacctccacctcccaggctcaagcgattctcctgcctcggcctcccgaggagcttagactacaggcgcccaccaccacacctggctaattttttttttatttttattagagatgaggttttaccatgttgaccaagctggtctctaactcctgacctcaggtgatccacctgcctcagcctcccaaagttctgggattacaggtgtgagccactgcacctggcccctccctgcttattcttattcttctgccctctatttggggactagtgttacttagtcacttctttattatgtttgcttgtattttgcactttaccactgataccatgtttgctgatccatccctccctttcacagcctgcatacggattacagtttgtagtttggaaacaaaccagagacacttccattaaacagttgtctccttcatctccccctccccctccccctctgatgcttctccagtaacttaggcattttggatttctttcagactggaaagctacccttgaggagaataggttgaattctgaaaaagatcgagctagggaagaactatcccaccacgtggaagtgtacaggagtggaccggaggagccaccctctttggtattaggaaaagtgcaagatcagagcaaccagttaagggaacaccaggagaactccttgaggttcatggtactcacctcagagagactgtttgctcaaagggaacattgtgagcttgaacttgggggaggttattctctaccttctactttaagccttctacctacaacattacctacaagtacaggtttccctaagcccaactcacaagttaaagagttgaaacaaaattcagctttcattaatcatgagaaaaatggagcagatgggaagcactgtgagagtcatcagtgtgctagagctttctgtcagagtatttacttgagtaaacttggaaacgttgaaacaggaaagaaaaacccttatgaatatattgtcagtggtgactctctcaactatggttcctccctttgttttcatggtagaactttttcagtgaagaaaagtgatgactgtaaggattatggaaacctcttcagtcacagtgtgtctctgaatgaacagaagccagtgcattttgggaaaagtcagtatgagtgtgatgagtgcagggaaacctgttctgagagtctgtgccttgtacaaacagaaagaagtggccctggagagacccccttcagatgtgaggaacgctgtgctgccttccccatggcctcatctttttctgactgtaacatcattcagactacagagaagccatctgtgtgtaatcagtgtggaaaatctttcagctgttgtaagctcatacaccagagaacacacactggagaaaagcccttcgaatgtactcagtgtgggaaatcttttagccagagctatgaccttgtcatacatcagaggacacacactggagagaagccctatgagtgtgacctgtgtgggaaatccttcacccagagatccaaacttattacacatcagcgaattcacactggagaaaaaccgtatcagtgtattgaatgcagaaaatccttcaggtggaactctaacctcattgtacatcagagaattcatactggagagaaaccgtatgagtgcactcactgtggaaagtccttcagccaaagctatgagttagttacacataaaagaacgcacactggagaaaaacccttcaaatgtactcagtgtgggaaatctttcagccagaagtatgaccttgttgtacatcagaggacacacactggagagaagccctatgagtgcaacctgtgtgggaaatccttctcccagagttccaaacttattacgcatcagcgaattcacactggagaaaaaccgtatcagtgtattgaatgtgggaaatccttcagatggaactctaacctcgtcatacatcagagaattcatactggagagaaaccgtacgattgcactcactgtggaaagtccttcagccaaagctatcagttagttgcacataaaagaactcacactggagaaaagccctatgaatgtaacgagtgtggaaaagccttcaatcgaagcactcagctcatcaggcatctgcaaattcacactggggagaagccgtacaaatgcaatcagtgcaataaagcctttgcaaggagctcctaccttgtgatgcatcagagaactcacactggtgagaaaccttttgagtgtagtcagtgtgggaaagccttttcagggagctctaaccttctttcccatcacagaattcattctggagagaaaccctatgaatgtagtgactgtgggaaatccttccggcagcaatctcaacttgtagtgcatcggcggacacatactggagagaaaccttaggagtgcagtcattgtgggaaagctttcatccagaggtctcccctcatcatgcaccagaggacgcatgtcggtgggaagagctatcagtgtgacgtgtattaagccagcggttgtgactcattgaacatcagaggacatatcctggagaaaagccctacgaatgcattgattgtgggaaagccttcaatgatcgctcaacccttagtaaacacgagaggacacacactggaggcaaaccctatgaatgtgaccattgcgagaaagcctttagccaacggtgtcaacttactaggcagcagagaattcatactggagagaagccctgtgaatgttaacaaatgtggaaaagcttccagttatgatactttccttattcaacatgagaaagctcatgggcaagaaactctatgaataaccaagatggagccgggtgcagttgccaacacttgtaatcccagcagtttgcgaggccgaggcaggtggatcacttgagcccaggagtttgaaaccagcctgggtaacatggcaaaatcctgtctttacaaaaaatacaaaaattagcctagcatggtggcgcatacctgtagtcctagctactcaggaggctgaggtgggaggatcacttgagcttgggaggcggtggttgcagtgagctgtgatcatgccatcacaccgctgccttgtgagagattgagacactctaaataaataataaccaagatgggaaatttccctgccagaccttgtttactagaaatcaggtggccaaaacatgactctcagagtggggcttcatgaccatgtgcatcagaattgcctggagtgtgcactgaaactgtgtattaccaagctcactctagccaactaaataaaaatctctggcagtaaaatccaggagtctgcagtttctaaaatcacacaggtgagtgggcatggtggctcatgcctgtaatcccagcactttggaaggctgaggtgggtggatcacctgaagtcagaagtttgagaccagcctggcaaacatggcaaaactgtctctattaaaaatacaggccaggggccgggcacggtgcctcacacctgtaatcccagcacttaggtaggccaaggtgggtggatcacgaggtcaggagattgagaccatcctggctaatatggtgaaaccctgtctctactaaaaatacaaaaaaattagctaggcatggtggcgggctcctgtagtcccagctactcaggaggctgaggcaggagaatggcgcgaacatgggaggcgtagcttgcagtgagctgagatcacactactgcactccagcctgggcaacagagcaagactgtctcaaaaaaaaaaaaaaatacaggccaggcacaatggctcatgcctgtaatcccagcatttcgggaggcaaaggcaggcggatcacctgatgtcaggagttcgagacccacctcaccaacatggagaaaccccgtctcgacgaaatatacgaaaattagccaggtgtggtggtggtaatcccagctactcgggaggctgaggcaggagaatcttgacctgggaggcagaggttgcagtgaaccaagatcaagccattgtgctccagcctgggcaacaagagggaaacttcatctcaaaaaaaaaaaaaaaaaaggactctggtgaggcttggtggctcatgcctgtaatcccagcactttgggaggctgaggtgggtggatcacttgaggacaggcattcaagaccagcctggccaacatggcaaaaccccatttctactaaaaatacaaaaattagccgggtgtggtggcacacatgtgtaatccagctacttgggaggctgaggcatgagaattgcttgaacctgggaggcagaggttgcagttagctgagatcatgccactgcactctagcttgggcaacagggcaagactgtgtctcaaaaaaacaaacaaacaaacaaaaaaccctgagctggctgtaatggctcatgcctgtaatcccagcactttgggagaccgagcggccaggcagatcacttgagcccagtagattgagaccagtctgggcaacatgttgagaccccatctctacaaaaaatagaattagctgggcatggagctgcacacctgtagtcccagctactcaggaggctgaggcaggagtattacttgagcctgggggtgggggggatggtctcacctgcagtgagctgagatcacaccactgcactccagcctaggcaccagagcaacactgtgtctccaaaaacaacaaaatattggactctgaatatttcagggattcggttgtgctttaactttgttgctcagttggtttgattgtaatcagaactggcagcatgttaatatggaaaatacttatcaggggatgtgaaaacaggagcccaagtagtatgttcacagaaggttacaagcacataatttaaattggtccactcagcaacatgtttcctaaaagaaaaaaatgtaaattgacagtagtggggagactagaagaggccatgtctgcatatttatttatttatttatttatttatttatttaagacagtctcactctgttgcccaggctggagtgcagtggtatgatctctgctcactgcaagctccacctcctgggttcacgccactctcctgcctcaacctgctgagtagctgggactacaggcacccgtcaccacgtctgtctaattttttgtacttttagtagagacaaggtttcaccatgttagccaggatggtcttgatctcctgacctcatgatccgcccacctcggcctcccaaagtgctgggattacaggcatgagccgccacacccggccgcatttatttttattttttgacacaggctgttgctctgtcacccaggctggagtgcagtggcgcagtcatggctcactgcagcctcagcctggatcaactgatcctcctgtccttgcctcctaagtagctgggaccataggcatgtgacatgaagcctggctaaatttatttttttagagacgaggtctcaccatgttgcccaggctggtcttgaactcctgggcccaagtgatctccagccttggcctcccaaagtcctgggattacaggcatgagccatagtgcatactattactgcacatttaagcaggataagagccaatgggagggtgagcatggtggcttatgcctgtaatcccagcactttggaaggccgaggcaggcagatcccttgaggttaggagttcgagaccagcctggccaacatggtgaaatcccatctctactaaaagtacaaaaaattagccaggtgtcatggcatgtgcctgtaatcccagctactcgggaggctgaggcaggaaaatcacttgaacccagaaggtggaggttgcagtgagccgagactgcgccgttgaactccagcctgggcaaaaaagcgaaaagcgagactctgtctcaaaaaaaaaaaaaaaaaaaaaaagggctgtgtgcggtggctcacgcctgtgatcccgacactttgggaggccaaggagggtggatcacgaggtcagatcaagaccatcctggctaacacagtgaaaccccgtctctactgaaaatacaaaaaatcagccaggtgtggtggcaggtgcctgtagtcccagctacgagggaggctgaggcaggagaatggcatgaacccaggaggcagagcttgcagtgagccaaaatcatgccactgcactccagcctgggcgacagagtgagactcggtctcaaaaaaaaaaaaaaaaaaaaaaaaagatggaagtatagccaatagcgaaacatacagaatgaggaaggctggagagggtcaggcgaggagaggctgtggcagcagatgtggcagccccagcagagccatagactgatagaccagaaagtgggttaatcgaaggtctgtccatgaaactcagactcttccccatttttttttcttgcctggcattacctatctggctgtgggtagcaaaaattaaagtagggaaggagtcatgtgctaaaagattagttcaggggacaagggaatctgatgtattttgctctgcagcaagggctgctttattctggcatttcagaactttttacctgatagctggttctcgccctcttcaccctcgagcaaagcgtactgttaaagcagccccgcctgtctgtggagcttcctgtctgctttctgatagtctcttcaatatgggtgggaggcaaggagcaaaagataaagtctccatcatgagagaaggtatctaagacagcagaaaagacagatattcagaggaaccaaatattctttgttttttgagacggagtctcattctgttgctcaggctgtagtgcagtggcacgatctcggctcactgcaacctttgcctcccaggttcaagcaattctcctgccgcaatgtcccaagtagctgggattacaggcacgtgccaccatgccaagctattttttgtattttcagtagacacggggtttcaccatgttgaccaggctggtctcaaactcctgacctcaagtaatccacccaccttggcctcccaaagtgctgggattacaggtgtgagccaccgcacccagcagaatcaaatatttaaagcattttgttaacgtaaaagtgagtcaagaaagggttacaaggccgggtgtggtggctcatgcctgtaatcccagtactttgggaggccgaggcggtcggatcgtggggtcaggaggtcgagaccagcctgatcaacatggtgaaaccccatatctactaaaaatacaatacaaacattagctgagtgtggtggtgggcgcctgtaatcccagctacttgggaggctgaggcagaggttgcagtgagccgagatcatgccattgcactccagcctgggtgacagagcgagactccatctaaaaaaaaaaaaaaaaaaaaaaaaggtctggtgcggtggctcacgcctgtaatcccagcacttcgggaggccgaggcaagcgtatcacgaggtcaggagatcgagatcatcctggctaacaggtgaaaccccgtccctactaaaaatacaaaaaattagctgggcatggtggcgggcacctgtagtcccagctactcgggaggctgaggcaggagaatggcgtgaactcaggagaaggagcttgcagtgagccgagatcacgccactgcactccatcctgagcaacagagcgagactgcgtttcaaaaaaaaaaagagggttaccagtaaaaaataagacagactgggcgtagtggctcacgcctataatcccaacactttgggaggccgaggcgggcggatcacctgaggttgggagtttgagatcagcctgaccaacatggagaaaccctgtttctactaaaaatacaaaattagccgggcatggtggtgcatgcctgtaatcccagctactcaggagtctgaggcaggagaatcgcttgaacctgggaggtggagattgcagtgagccgaggtctagtgccattacactccagcctgggcaacaagagtgaaactccgtctcagaaaaaataaataaaaataaaaaataagatactttgataaaatagaacaatgagaaccagaacaggctctttgaaattacaagtaagattgttcaatgttatagatacaatgtttagtgagaaacagaatgcttgttgcctggtgctgcaaagaaatagcactcaaaacataaatttaattctctcagcaaggccgtttttactttctgcagaaagggtgctcatcacagatggaacaatggcaagagcacacctgaacaaaggagggaagcaatttttattccttaggcagtttgtccctgctactgtgtcctgtctccgttggctggagccagcctgcacaatctaaactaaaactagattagctaacagtttaaaacttttctaaataggtaaaagtagtggaaagacgaaggaaaagaggaagttgcttatgccagatatggaaggagcataggctgtaagctggaacgtgaccatgagcatgtccagcacaaataacttggttaaggtacagggacatagaacgtactacgtgcctgtgagcatgtttaccagctacataggatagggcctaacaaagacttactagcacaaagcaaggaggtttcaaggaagttagtttataaaagaaactattattttttaacacttatgatttattctttaacaagaagggaaactttgaagaggaacttttactttccacattgaacaaataagtaagaaaaagaaagggaaacttccccagggctgaaaggaaattttcaggtcatgccattattatcagaattaataagacccatgcatcgtggaaaactgagaacaccacgactaaaaacagatggcaggctgggcgtggtggctcacgcctgtaatcccagctctttgggaggctgaggcaggcagatcacctgaagtcaagagtttgagaccagcctggccgacattgtgaaacctcatctctaataaaaattcaaaaattagccaggcatggtggcagccgcctataatcccagctattcaggaggctgaggcaggagaatcgcttgaactcgagaggtagaggttgcagtgagctaagattgtgccactgcactccagccttgggcgacaaagcgagactctgtctcaaaaaaaaacaaacaaaaaaaatgtcagggtcgggcatggtggctcacacctgtaatcccagctacttgggaggctgaggtaggagaattgcttgaacccaggaggtggaggttgcagtgagctaagattgtgccactgcactccagcgtgggcgacaaagcgagactctgtctcaaaaaaaaaaaaaaaaaaaaagatggcagggctggcatggtggctcacgcctgtaatcccagcactttgggagaccgaggcaggtggatcactctaggttaggagtttgagaccagcctggccaagatggtgaaaccctgtctctactaaagatacaaaaattagccaagtgtggtgataaatgcctgcaatcccagctactcaggaggctgacgcaggagtatcacttgaacctgggaggcagaggttgcaatgagtctagatcatgccactggactccagcctgggcgacagaatgagactctgtctcaaaacagagcaaatggcatggcagaaccttctctagagaaaatagttttgaatctaagaaaggaatagctttaatctagaaaaggaatagggcaagaaaaggaatgtttattcacccataacttaaaaaaaaaggtaattttaattgaaggcttcaaggtaaattgtgctcaaactatacaaattctgctagatggttatagttcctatgtgaaggtaactttagaaagtagtgttcacttgacactgatgtgagtaattcttgctggagggggcaaaaagctcatgaaatttgaataaaggaggaggagatgcagtcagattgttgattgacccttcagggaatggcatttgcatagctgtgacgtgaaccctaggtattggctttttttttctttttttttgagaaggagtctctgttgcccagtctggagtgcagtggcgcgatcttggctcactgtaacctccgcctcccgggttcaagcaattctcctgcctcagcctcctgagtagctgggattacaggcacgtgccaccacgcccagctaatttttgtatttttagtagacacagggtttcaccatgttggtcaggatggtctccaactcctcaccttgtgatccgcccaccttggcatcccaaagtgctgggattacagggatgagccattgcacccggcctgtattggcttttaatttttaggaagtaacacatggctgtgacctgacaacttcatagtggccgtagggtagggcactgttgtcattattcctgtcactgacaatgtcagccccacctgcagatgtgggagagtagatggggaaagtagtagtggagagtagaggtttcccttaccatccttttaggaagtaggcttttaaacatgatatgtaagtttatttagaagatgaaaattaaagcttgaaatgtaatatgagaggaattggcagcggatgtgagtcagatcctcacctgtcagagcaggaagttagtgaaaactaaagatgattggctggatgcggtggcttatgcctgtaatcccagcactttgggaggctgaggtgggtggatcacctgaggtcaggagtttgagaccagcctggccaacatggtgaaactctgtctctactaaaaatacaaagattagcccagcgtggtggtgggcacctgtaatcccagctactcaggaggctgaggcaggagaatcgtttgaacccaggaagtggaggttgcagtgagctgagattgcatcactgtgctccagcctgggcaacagagtcagactccgtctccaggaaaaaaaaaaaaaaaaagactaaagatgatcaaagattagaattacggaggtgtcctcaagaagaattggaacagatatggttaaaagtggctggaggtgggtgcagtggatatggtggtgcacacctgtaatcccagtgctttgggaggctgaggcaggtggatcacttgagcctaagagttggagaccagcctgggcaacatggcgagacctggtctctacaaaaaatacaaaaattagccgggcatagtagcacatacctgaagtcccagctactcaggaagctgagttgggaggattctttgaccccaggaggttgaggctgcagttagctgttattatatcactgcactccagcctatgtgacagtgtgagaccctatctcaaaaaaaaagtgatgtcgggaggctgagaggatgagtgactggggcaggagatgagtactttcccttttaagcccatagcatttaattccctggtggttcacttcttatttggataactaacaaattatttcaaatgtgtgcctataggtgagagaagcaatggtacatgaggaggtaagcatttgatttgtgggattatgaacaactgtcctactctccttttgattcggtgtctctgtattagtgatctgacaatttaaaaaatcaagcaagagcaggctgggcgcagtggctcatgcctgtaatcccagcactttgggaggccgaggcgggcggatcacttgaggtcaggagttgaagaccagcctggccgacatggtgaaaccctgtccccactaaaaatgcaaaaattatctgggcgtggtggtgggtgcctgtaatgccagctacttgggaggctgagcaggagaatcgctggaacccgggagttggagattgcaatgagccgagattgccccactacactctagcctgggcaacagagtgagactccttgacaggaaaaaaaaaaaaaaaaagcataaagaaaagatgtcagacttgtctgtttggccagtttgagtttatttcagcaggcagggcaggaaggttccttggcttcctagaatcccctggagttggatgggtgtggtggcttacacctgtaatcctaacagaccaaggcccaggtggaaggatcaactgaggccgtgagtttgagattagactgggcaacatggcaggactctgtctctgcaagaaataaaaaaccaggtgtggtggcacgcgcctgttgttccagctactcaggaggctgaggtgtgagatcacttgagcctgagaagttgaggctgcagtgagctgagattgcaccactgcattccagcctgggcaacagagtgagaccctgtttctttaaaaataaaaataaaaataatcccttggatttaaagggagtgggttagtccttgaagatttgattttccagaattcttatcaagaagaagttgaggcgggagaatcatgaggtcaggagttcaagaccagcctggccaacatggtgaaaccccgtctctactaaaagacgtggtggtgcgtgcctgtaaatccagctactcaggaggctgaggcaggagaattgcttgaaccgggacctgggaggcggaggttgcagtgagctgagatcgtgccactgcactccagcctgggctacagagcgagtctccttctcaaaaaaaaaaagaaaagaaaagaaaaaaaggccgggcgcggtggctcatgcctgtaatcccagcactttgggaggccgagttgggcagattgcaagttcaggaaatcgagaccatcctggctaacatggtgaaacccatctctactaaaattacaaaaattagccgggtgtggtggcgcatgcctgtaatcccagctacttgggaggctgaggcaggagaatcgcttgaacccaggaggcggaggttgcagtaagccaagatcgcaccattgtactccagcctgggcaacaagagcgaaactctgtctcaaaaaaaaaaagaagaaagaaaccaaaaaagtagaaaatcatattatcatatactttaatagcacaacaaaattacaaattaataattgtgggtattttagaatatatatgaaacagctatttggtcaaagaggaaataaaaatactacatctgtttaagtaaaaataagtactctgtatcaaatgatcaacatgaatacaaaataccaaagcttgcctaaagcctaggccgggaacgatggctcacgcctgtaatcccagcactttgggaggccaaggtgggcggatcaccaggtcaggagatagagacccgcctggccaacaggccgaaaccctgtctctactaaaaatacaaaaaattagccgggcgtggtggcgggtgtctgtaatcccagctatttgggaggatgaggcaggagaatcgcttgaacccgggaggtggagattgcagtgggccgagatcgtgtcactgcactccagcctgggcgacagagtgagactctgtctcaaaaaaaaaaaaaaaagcctattctgtagacaagtgtgtctcacgttttttgtctcaagaccccttcacactcttaaaagtcactgaagaccctaaacagtttttgttttgttttgttttcccccaagacagagtcttgctctgccgccaggctggagtgcagtggcgtggcctcagctcactgcaacctctgcctcccgggttcaagtgattctcctgcctcagcctcccgagtagctgggattacaggcgcatgccaccacacccggctaatttttgtatttttagtagagacggggtttccccatgttggccaggatggtctcgaactcttgatctcatggtctgcccacctccgcctcccaaagtgctgggattacaagtgtgagccaccgtgcccggctcctaaacagtttttgtttatgtaggtcctatcaatatttggtgtattaggaattaaaacggaaaaaaattaatatattttattaatataatttttcaaaatctattctatgttaatatataggttgagctgtgtctcttcccaaaattgatatgttgaagttctaacccatagtacctcagaccttatttggagacagtgtctttaaagagctgaaatgaggtcattagagtgagccctggtccattatgactgttgtccttataaaaacagaaatttggagacagacaacttgtcacgcatacagggaaaatgacatttgaagacaaagtcagacatctacaagccaaggaatgccagagattgccagcaaaccaccaaaaactaaggaaagggatggaacatatactttcttgtagccctcagaaggaaccaactatgccaacactttgatctcagacttctggcttccacaactgtaacaataaatttatgtcgtttaagccaccccatttgtggtatgttgttaccagagccctcatgactaatacaacatattttttaaaaagcacctactttacgaaaaacagcattttccaaaacagaaatagggagaagagtggcattgtattatattttttcaaatctccttaatgtctggcttcacttaaggcagttgagttcccatagctccatgttcccattgcatctgttacaatatgactcatccagcagcctctggaaaactctattgtatattcctatgaaaatgagagaggaatagcactgggtagtccaggagaatggaaaaacccaaacgacaactaaaacaagcagtaggcaaagaaaccacagaataacaaaacccaaaataagggagagaagacagccaaaaccctggtcagggtgacaggtccatgactcttccaggcaaacccaaataagggagaaagggggtggtaactggggtggggcagggggagggtggtgcctgaaatcccctccttttccagataccgaatgactattccacccataattaaacacccataaaatgagaaatgcaaacaatgttgggtgtgactcaggagccaggagcccccccacacttgtctcccgtgtttcctttcactttgcaatgaaagcttcttgcctttctgcttactctgacttatccctgaattctttcctgtgatggcttcaagaacctggacaccaactggcactggcatccggtgaccttcctgagccctctggcaacaaaagaaaaagccaacatctcattattattatgaatttagttttgaacccaccgatcccttgaaaggatctcaggaacgcccagggctccctgacccacactttaagaactactgcaatagacaaactcctaccttataatcaaggagataaacaagaactagaaaagaaaaaaaaaataggctgggcaccgtttttgtaattccagcactttgggaggccaaggcggatggactgcttgaaatcaggagctcaagaccatcctaggcaacatcacaaaaccctgtctctacaaaaaatacaaaaattagccaggcatggtagcatgaggctgaggtgggagaatcccttgagcccaagaggttgaagctgcagtgagctgtgatcacaccactgctctccagagtgggcaacaggtgagaccctgtctcaaaaaaaaaaaaaaaaaaaggaaagaggaaataataggacatcaaaatcacagattccacaccattagaactaggaggaaagctgagcccagtgactggctccaaaatgaatacacagggccgggtgcagtggcgcattcctgtaatcccagcactttcagaggctgaggcagataagattgctttgagctctggagttcaagaccagcctgggcaacatggcaaaatccagtctctacaaaaattggcccagtgtggtggctctcacctgtgctcccagctactcaggaggctaaggatgcaggatcacttgagcctgggaagtggaggttacaatgagccaagattgcagcactgcattccagcttggacaacagagtgagaccctgtctcaaaaaacaaataaacaacaaaaaaagaacacacaggtttcccctaaagagaatagatctttgcacacctgcccctacctctccaacactggtggccactgtgcaggggaaggcaatagatcctcctagtaccttctctgcctacagagaaggggatgctgcctgggagctttttgggactcccaatagaagacagatttagtctcctggaaggctgcctgatccagttcccacagcagctgccacttgctcaggtgagtgaagacatctgtcaaaagtcagaattttatttttattttattttatttttgagatggagtctcactctgtcgcccaggctggagtgcagtggcgcaatctcagctaatcgcaacctccgcctcccagtttcaagcgattctcctgcctcagcctcctgagtatctgggattacaggtgcccgccaccacacctggctaatttttgtatttgtattagagacaaggtttcaccatgttggccagggtggtctcaaactcctgacctcaggtgatccacccacctcagcctcccaaagtgctgggattcactcacaggcgtgagccaccacacccagccaaaagacagaattttaacaaatttggttaaagatcgaattggcttttatttgtgattcatgaatctgggcagcctccactctgcaaaacggaatgagagctcccacggggcaaatggtagaatagtggtttttgtaagatagagaaaaggctaattagttaacactaggttacttttcttgtaaggattaaagcagaggggacttccttattatgctgctcaggtagactggaaatctggtttgtttagggatctacctgcttaaagtatcagtctgattatgtggcatttagcctaagtgactctgtcttggtttggtctggtctcatgaggcctagagcaggagctcagtccaaaaccatgtcctctcataattttgtgtaacttgcctaacacctgctccttctcaggaacgaggcccagcaaaaagcagagacggtacagggccagaaggatctgagagagtgtggccagcttgagccctcaggagtcggccagaaggatctgagagagtgtggccagcttgagcccctcgggagtcagctcctccgtccccactggtaacgtcttcaccccttcaacacggtgtgaagggccatgtcatggttgatcttcagtccctcagactacaccatcagccccatgggggtgagcaaataacaagtaactatactgttccctgctatgtgtctggctcttggtaaaatttaaaaaagttaaaaattgttgtggtttgaatgcaacatttttgaatggaaatctgcttccccatttttcttttttaataactttttattttttttttgagacggagtcttgctctgtcacccaggctggagtgcagtggcctgacctcggctcacggcaacctccgcctcccaggttcaagcgattctcctgcctcagcctcccgagaagctgggactacaggtgcccgccaccacgccgggctaatttttgtatttttagtagagacggggtttcaccatattggccaggttggtctcgagctcctgacatcgtgatccacccgcctcgacttcccaaagtgctgggattataggcgttagccaccgcgcccgacctttaataaacattttaatggactacaacagacccacagaaaaagacacatcacaaagtgaacacccacagggagaagcaatagggctgtcagaggcattcgacccagagcgactccattttgagtgagggctaggaaaatgaggctgggctgcattcccagaaaagtaggtattcctaacctctagatgtttacggttaagggaacaaattaataatgggtactaaaacagacccagacttgggagtgtccagatatcccggtatctagagaacaaaggcattcctaattttgctttaaaaataatatcgattcttgaaaaatacagtaagaaaattaatcctttttcacaaacccttgtagcagagcacatctccccaaaatctatttttagcccaaatatacacaagcattgtacctagggtgcatacgttcctcttactttcaggaacgtcctactgtctatggggtagctgtttcacaactttactttctcaacaaacttgcttttactttgcactgcggactcgccctgaattttttcttgcgcgagatccaagaaccctcccttggggtctgaatcggacccctttcctgtaacacaaccaccgctcccagcctccccgcttccagccgctaagcccaaagtcttttatatgaacaaacctctaactcgtcctgtgactttgatgcgtgtgcgttttaggcaccggggagcagagggtaaagcggcgcagctccgggcctcctcccgcgcaagttcccgagaagagcaggtccggcccgcgcagacgtgcacggtccccagccattaggaggagcagacggtccccacccccacaatcagtcatctctcggggtccgcccttgcttcctgcccacgagtgaggcctctggttgcccgcaacctaaggggcatcgcagccccgagcaacaccgcccccaccagccttagctgagtgctcccattggccagaggccagcgggtgggggctcccattggccatcggccataatgcttccattggtcgaaggccagaccagcggagactcccattggccgagggctgtggttcgccgcacggcctactgggagttgtagtcgccgcgtcgccggtgcggccgccattgtccggcgttcggcgagtcgggtggtccctttggctggagtgcctctctggtctggggatcacctcaggcgctgtccttcactgggcgatccagcatggaccccgaggacgaaggggtagcgggagtgatgtctgtggggccgccggcggcccggcttcaggtaacaataacaacaataacgacggcggcgggctccgggcaagcgtctcccgcgcagactgaccctttcacctcgcggcgcgatgagagcggcaccgctgttaatgcccttgacacgtggggaaactcagacgcgggtcggggcgtggtgaccgtcctggctggtcagagagggggccgggattccaaccaggcgcctggcccccgaatgcgcatgctccacgcggctctgtcctccccagggctggggtcggtcattcccgagagaatcgagcaggcccatctcctgcgttctgctccgccccgccgacacccttgcccattccaggaaggtctgtcctcgtgttgactgataacagtaattgtagcgttggccgggtgcccagatggcaagaatcatcgaatagagatgctttaacgcgtggagtcagcggacacccaccgggaccccagcaccgcggagcccctgccctggggcttgggcacaacctcttgggggcaatgatgggtcaccacgcactgagtgtgatgagagtgaccaccagggtcgtcccctgcgagactgtgggagaactgcagtgcagggcggtcagtgtttgcagggccatctggccatcagagctccactttctagacaaagtggttgcggcctgtgttctccataaagctgcctcgcgtggcaggaaacaacaataattatccttcctcaagctctgcaactttgaaattatacttttttttattttttgtcgttggtttgttcatggggatttgcattatttcagatttggtacacaaagtgagacttgataatcttaggttgcaggttttcagatgtgtgttgctccaaatttgcatgaaatgctaccacgttttattttgttcttgctgtggatgggggacaaggaatgagtcgtaagaaaggcttgagagaaagtgtattagttacctgttgctgtgtaactcaaaacttcgtgacctggaacaacaataaatatctcacgagttctgacaggagtaatggaatgtcctagctggtggttctggttcaggcccatgaagttacagtgaagatgtcagcatagctgttgtcacctgagacctgagtctggaggatccacctccaggatggctcactcacatgtctgttgataggagacctcagttgttctccatgtaggcctctctttggaactgctagggatccttgcaacatggcatctggcttcccacagaacaagtgatccaggagagggcaaggtagaaactgtaacaccttccatgacctggattcagaattcacactcttgtcacttccacggtgtcttactggttacaaagtcaaccttgttgagtgttggaggggaccacaccagggctggaggtcattggcagaggtggtgggggagcatcttggagactgtccatcacaggagacaaggaccagaatggagagcttcaaggtccagtgttttatctggttatctgtgtctgctgtaacaattcactacaaattttgtggcttaaaacatttgttcttaggttctggaggtcagaagtctgaaatcggttttctggtctggaatcaaggtatgagcagagctaccctccctaccaaggttctagggtagaatgtttcctcgtcttttccagctgtgagaggtacagaccttctattccttgcctcatggccctttgcctgtcttcaaagcctgcattgtagcatgttgcttcagtgatcatattgccttatgtcttctatagtcatagctccctttgtctacctcttataaagacacttgtgattgcatttagggcccacctggataatccaggataatttttctgtttgaaaatcctaatcacatctgcacagttccttttaccatatatagtaatattcacaggttctaggaactaggacctggatatccttggaggccattatatatctcagtctaccatagccaggctgagaggagccatccagtattcagtgatgagaaggagccattcacgtgttttaagcaggactggcatagggttgaaaaaatccacttatgcattaggggctggtgggaagggagatactggcagctcaactaaggcagtgggaaaaagagaggagtggttaggcccagtgaccaggtgttggctgatgctggggtgaaaagaatatgtaaaggagaaacatcagagcacagccccaccccttcaggctccagaagtgcaagacaagagggaaggctgcagggatctgatgtagggcagaaagaacatcatgagacaacaaggagtgggcttctgctagaattccaagaaggaagccaagaggaggcatgaaggacttgtatgatgccactgagaattctcatggcttggacagaccagtactcagtggacgtggtgtctaggctgtcaccagtgactcttgcagaatgggtgatgatgggaggtgggggcaggaggcacgggaagcacaaatcaaaattggtgggcattctgagtggaggaaagcgaagacacagagacaggagcagagacctcagttcccaaccaaaggcatctttctgtatgtttcctattagagccacctgctacctgtactaaaatttctttcttattttttaatctactcatgtttttcttaaaaggaaatgtccttttaaaattgaagtatttggggcctggtgcagtggctcatgcctgtaatcccagcactttgagaggccacagcagatggatcacttcaggttaggagttcaagaccagcctggccaacgtggtgcaaccccatctctactaaaagtacaaaaattagctgggtttggtggcacatgcctgtaatcccagttatttgggaagctgaggtgggagaatcacatgaaccagggagatggaggtcgcagtgaaccgagattgcaccactgcactgcagcctggtcaacagagtgaggccctgtctcaaaataaaaaataaaaaaattgaagtatttagtatatgtggttttgttttgttttttaacctagcagcaacactggtggtgtatagttttgatttttcatttccctgatgactaatgatgttgaacatcttttcatgtacttatttgccatttgtgtatcttcttttatatattcttcaaagaaataactatacagattctttgcctattttaactgggttgtctttttattactgagttgtatgtgttcattacatattctagatacaagtctcttatcagatatgtgattcccaattattatctcccattctgtgagttgtcttttcactttcttgctaatgtcctttgaactacaaaagtttttgttttgatgaagtccaattgattacatttagttgcttatccttttggtttcatatctaagaatcccttgccaaatccaaggttacaaagatttatctctctgttttcctctaagagttttatagttttagctcttacttttaatttaatttaatttttttttttttgagatggagtctcactgtgtcgcccaggctggagtgcaatggcatgatctcggctcactgcaacctctgcctcctgggttcaagcaattctcctgcctcagcctcccaagtagctgggactacaggagcacgctgccacgcccggctaatttttgatattttagtagagatggtgtttcaccatgttgcccaggctagtcacgaactcctgagctcaggcaatccactcgtctcagcctcccaaagtgctgggattacaggcgtgagccactgcgcccagcctcttacatttatggctttgtttctattttattttatttcttttttttctcttcttttttttttctttgagacaggatgtcactctggttgcttaggctggagtgcggtggcatgatcttggcttgctgcaacctccactttccagactcaagcactcctcctacatcagcctcccaagtagctgggactacaggcagcctggctaatttttttcaaattttttttgtagaggcagggttttaccatgttgcccaggccagtcttgatctcctggactcgagtgatctgcctgcctcagcctcacaaagtgctgggattacaagcatgagccactctgcccagccagcctaatttgttttgagttaatttttatatatgatataagatagaagtctgtgttagtttgaatgtgtctcccaaatttcatgtgttgatagtatttgaaggtggcgacttttgggagaaatttaggattagataaggttatcaggattggactcccttgatgggactagtggctttagaaggagagagagacctgagctggcacactcttgccctctcgccatgtgatgccctccaccatcttatgtcataacaagaaggccctcaccagatgccagtaccatgatattagacttcccagccttcagaactgtaagaaataaactcttttttttttttttttttgagtcggagtctcactctgttgcccaggctggagtgcagtggcgcaatcttgactcactgcaagctctgcctcccgggttcacaccattctcctgcctcagcctcccatgtagctggaactacagacgcccaccaccacgctcggctaattttttgtatttttagtagagacagggtttcatcgtgttagccaggatggtctcgatctcctgacctcgtgatctgcccgcctcggcctcccaaagtgctgggattacaggcatgagccaccgctcccagcccacaaataaactgtcttcatcaaagttattgaaagagagagagagaaaaaaagcaactttctttataaattacttcgtccttaggaggacaaggcgagaggatcacttgaggtcaggagttcgacaccagcctggccaacatggagaaaccctgtctctactaaaaaatacaaaaattagctgggtgtggtggcgtgcacctgtagtcctagctactcaggaggctgagccaggagaatcaactgaatccgggaggcagaggttgcagtgagccaagattgtgccactgcactccagcctgattgacagagtgagactcccatctcgagaaaaaaaaaataataaattattcagtctgtgatattctgttacagcaacagaaaatatgctgggacagggactatctttactcttttccatgtggctatccagatgtcctgtaggaagtgtttgtaaaccacttaatcattatacagcccccaaggggtgatgctttgttgacatggaaactgggaagcaaagatgcttcttggggacgaagtgactgagccaagactctgatccagaaatatctggctttcaagcatggctgcagaagggctttgtttatgggacacattttaggtaatgttgcatcaacttataaaaatcagaatttttcacgtaaaggccaggcgcggcggctcccgcctgtaatcccagcactttgggaggccgaggcgggtggatcacttgaggctaggggttcgagaccaacctggccaacatggtaaaaccccatctctactaaaaatacaaaaattagccgggcgtggtggtgcgctcctgtagtcccagctactacggaggctggggcaggagaatcacttgaacctgggaggcagaggttgcagtaagtggaggtggcaccactgcactccagcctgggtgacagagcaagactctacctcaaaaagaaaaataatttttcacataaaaatctgacctaattttcagcttctcttcagagatgagcagttctgacaaagggacctgtattttcccgtaatcagtgagttctgagtccctgctgctccttcagacagggtccatgctccccatcacctccagtcccaccactcataggtaagtgtccttgtgggctcttaaactggcccacttctgtcatgtgagcctgccttgccctgaaagcaggcgaatttctgaccccagccctgtgtgcttctcttttcaggaaggatggtgaacctgtttttttgttttttttttttgagatggagtctcactctgtcgcctcagctggagtgcagtggtgtcttggctcactgcaacctccacctcctgggctcaagcgattctgctgcctcagcttcccaagtagctgggattacaggcatgtggcccagccaatttcactttgtatctaagtattagtgagtgtattagttagctgctgtgtaacactgtcctaaaacagtatctgttttacttaaaacagtaactgtttctttagctcacaaacctgcaaataagtggtttaggccagtctctgctggtaccctcgtctgtcttgttagatgtaggtcagctctgcctggcgttgttgatcttggtgagtcctctcacatgtcctcactgtacaacccacacctatgtgtagtggcctaataggtgcccagtgagacctgactcccatcattcataacgtgcagtctctcgtgacacaggcctgcctgttttctccttttccattcttcctctgccagaaagcactgatggagatagtccagctgattgagaatgtgtgtgatgtttcaggaaccagtgaccttccgggatgtggctgtggactttacccaggaggaatgggggcagctggaccctacccagaggatcctctaccgtgacgtgatgctggagacctttggtcacctgctctccataggtaagccctgcttcgcaaggtgtgatagctgattctctctgggttataagtcatggggcctctggtgtgaggacctgaccttgggtcctcactccctatggggagtgcatgaagagggaggtctgcccttttccatcaccatgcagagcttcaccatgttgtgaggtgcccacgtgtcctcacagtcgggagtctggtctggagcctgggcttgttgtttctctcctgagcagcccctcacctcctgtgtttttccccatttccaggtcctgagcttccgaagcctgaagtcatctcccagctggagcaagggaccgagctatgggtggctgagagaggaaccacccagggctgccatccaggtgagaacccactatgtgggagcagctaatgggagcagcctagcaggtcactggagatgcacttcatggaaagggtggtggttggtggtcctgaagaccaccccattcactaggagtatacaggactcagcatagagtcatgctgacagctctcagtataatgagaccaacaaaggggaaaggcgcgtggggataagttcagaggaagccaggcatgagcctccagagtcccctcactgtggagtcattcaggatgtgccaggctcccccagcactcaggtgtgacacctcatgagacatgagctctaccagggaatcttgttaagagactcagtgctaggagttttgactgaggctgccacatagacactctctgcctagcacagaccaaggttccagactaccaggagaaagccagtgtttggaataaaccacatagtgtgtgcagtgtgggtgtagtaaaccactctcatcagttagggttgtgggaaccatccccaaatccaaattctcagttgcagccaaaggctaaccttgtgaataggcttctcctaagaatgctggtttcaggcctgccctgttaaatcttttctgcacagtgctccatagccttctcacctgtgctccccatcttctaagctcagaggtcatcacctgtgctccagtgctgagaatcccaccccttcctccctctctgcttcatcttcccttataggttccaggtcattccctctctcaccatccttctcagcatgtcctttctgtggcatcatttctaatatgtgaacctgcccttcatcttctccatttcattcttgcatgtccagattctttgtgttttgttttgtttttaagacagggtctcactctatcgcctaggctggagtgcagtggcgtaatcacggttcactgcagccttgacctccctagttcaaatgatcctcccacctcaccctcccgagtagctgggattacagacatgcaccaccacgccctggtaatttttgtatttttagtagagatgggattttgccatcttgccaggctgggctcgaactcctgggctcaagcaatccacctactttggcctcccaaagtgctgggactacaggcgtgagccaccatgcccagcttttttttttttttttttgagaccgtctctgttgcataagctggagtggcagcagtgtgatcatggctcagtgcagcctcagccttcctgtcacaaatgatcctcctgcttcagcctcttgagtagctgggactacaggtgtgtacccccacacctggctaattttctttttaaatttttttgtagagacacagttgcactgtgttgcccaggctggtctcaaactcctgggctcaagcaatcctcctgtcttggcctctcaaagtgctgggattacaggtatcagccactgcacctggcctttttttttttttttttttttttgagacagtctcactccgttgcacaggctggagtacagttgcattatcttagtctcctaggctcaagtgttccacctacctcagtctccctagtagctgttactacaggtgtgtaccaccatgtccagctgatttttttgatttttttctttttcttttttaaaaattattttactttttttctttttttttctttctttcttccttttttttttttttttagagatggggtctcgccatcttgtccaggctgcaggctgctcaaactaactcctgggctcaagcaatcctgcctcaacctcctaagtgctgggattataggcgtaagccactatgcctgactttttgtttgtttgtgtgtccttttttttttttttttaatagagatgagatctttctacactgcccaggctggtctcaaactcctgagctcaaacagtcctcctgcctcagccactgaaagtgctgggattacaggtgtgagccactgtacctggtcacatgtctagattctgtaaacttgttccccacacccttctttattctcttatgaggaagaattgtgtttagctataaataccctaaaaccaggttggagcagctcaaaataaagaagcatttttcttgtaaaacaggagccctgagtctgctggtactgtcttggcatctcagaggtgccagggctgattgttctgtgattttcccaggctgtccttgggattacagtgcagctgcagcagctccagccatcacagttgtgctccatgcaggaaggaggggaagaggtaggaagaattctgccagccacatctgtccccttttggcagaactctagatgtcacctgctggggtctctttagccagaactaggtcacctcctcttgcactgaccctagttgctagagaggctggaaagctaggggtgtctagattgtcataattggcttgggcgagtcatggtccccttgctgtggcttgtgtgttggtaccctgaccacattctagagtaaatagcatctggccatgggatgtacaaccagcaatgcctgcagattagcctcccacccaaatacttctgatgccacccagggctttctgattctgcagaaaaacacatatgcccccatgatagcgtatgacctatcaactgggagtcgggtgaatctgctgcagaccctgttttcctgcccctttcatcggttgtcactgctgttacttcagacatgtatgtcggaagcaaattctcatcaccctggacatatgcctgtcactcacaagtcttatgccataaccaaatccaggatctaaaacgtgtgcccataaatactaagcaaaatgttgtgcttgcatggattaggagtatggggtcaaaatcatgatggacagtttcaataacttaatacctagacagttataaatactccagaagcagaaggttttcaaggctttatgttaagacagaaacatattttccatgtaatgctttgtattagtttcctgttgctcctgtaacaaagtaccacaatctaggtggcttgaaaaagcaccgatttggctggacgcagtggctcacccctatcattccagcactttgggaggccagggcagacggatcacttgagtccaggagttcgagactagcctggccaacatggcacaacaccgtttctactaaaaatacaaaaattatccaggtgtggtggtgcatgcctgtaatcccagctactcaggaggctgaggcacaagaatctcttaaacccaggaggtggaggttgcagtgagctgagatcatgccactgcactccagcctgggcgacagagcaaaactctgtctcaaagaaaaaaaaaaaaaaaaaggacagatttattttcttatagttgtggaggtcagaagttcaaaatggttcatcagggctagttcctctgacggcgcccagagagaatgcatttctgtctttctcagcagctggaggctgcccagactccttggttcatagacccttcctccatcttcagagtgcttcactctgacccatttccattatcacaaccgcttccctgactcagacccttctgcttccctcctatatggactctttggtcagatttagggccccaggataatctcccatttcaagattctttttttttttttgagacagagtctcgctctgtcacaaggctggagtgcagtggtgtgatctcggctcactgcagcctccgccttcccaggttcaagcgatcctcctgcctccacctcccaagtagctgagactacaggccgtgccaccatgcccagctaattttttgtatttttagtagagatgggatttcaccatgttggccaggatggtctcaatctcttgaccttgtgatccgcccgcctcagcctcccaaagtgctgggattaaaggcgtgagccaccgcgcctggcccatttcaagattctttttttttttttttttttttttgagacggagtctcgctctcttccccagactggactgcagtggcgcaatctcggctcattgcaagctccgcctcccgggttcacgccattctgccttagcctcccgagtagctgggactacaggtgcccgccactgcacccggctaattttttttttgtatttttagtagagacggggtttcaccgtgttggccaggatggtctctatctcctgacctcgtgatccgcccgccttggcctcccaaagtgctgggattacagacgtgagccaccgcgcccggccatcaagattcttaatcacagctacaatatcccttttgccacataaggttccagggattgggatggggacatctttgaggggccgttattcagcataccacatgattaaaatagagagtaaattttttttttattatttttaaggaaaagaagcctagtcaatagaagaagaccgcgtctctacaaaaaaatttaaaaattacctggcatggtggtgtgttcttgtagtcctagctacttaggaggctgagcggggaggattgcttaagcccaggagttcaaggctacagtgagctacaatttgcaccactgcactccaggctgagcaacagagcattaaaaaataaaggaaaagaggccaggcatggtggcttacgcctgtaatcccagaattttgggaggccgaggcgggtggttcgcttgagtccaagagttcaagaccagcctgggcaacctggcaaaaccacatctctacaaaaaatgcaaaaaaattagctgggtgtggtggtgcatgcctgtggtctcagctgttcaggaggctgagcccaggaggttgcagtgagctgagatcatgccactgcacttcagtctgggtgacagagtaagaccttatttcaaatataaaataaaataatggtgaagaatccctgtccaggcagatcccactcccagtgcactcacaggggtttgtgggctcagggatggctgggcgatctcaagcccctccttggcccctgtcactcgtctggcatcattccttactggttccctcttgcggttgctcagcttcacctgctgcaggtcacctcctggctgactacagtcccagctcttctcccatttcctctcttcatcaactgctcaccctctctctcggagactccatggcttcccatgtgccaggatcagtgagttgttctgggcagccaggagtcaggctggagttggagcctgtctcaacctcagtgctctttgctgttcctggccaggccagttcactagtgttctcaagtccccctcctccggatgttcttccgcactctcccagcaggcagcgttagtcttggctggggtcacagtgttgtctttagtctctgtgttttcgtccgtgttgtctctcaggcagtctcccagctcacgagcctgttccatggatgttcctgaggacctgccatgtgctgctgtttgtgctgtggatgcagcaaagaatgacaggaaaggctgagccctcactcagcatctgggagatggaagtcttgagagatggatgccagtgccaggcagtgatgaggccgtaaaggaaatgcacctggggagggcaagatggggtgctcatgccccgggactggcagggaggcctctctgagaaagtgactcaaactggggcacagggagcaaggtgggcagatgtctggggatgagggttcttggcagagggagcagcaggtgcaaagggccccaggaaggagtatgggggatgcattagagggatgtgaggagccatgtggagcagagtgggcgtggggcaagagtcaggaggtgagacgagccagggcatggtggagaagggcacagggtcgtgtccatcctcagaagtgactgcagagtgaatggaggagtgaccagggctggcttgcagtggggaggagggtgggtctgtttggttttgcataatagctttatcaagataaaattgacataccataagttcacctattaaaatgtaccactcagcggttttgagtatattctcagattgtgtgcagctatctttactatctaactccagaacatttcatcaccatcttagtcagcttggggtaccgtgacaaaataccaccgcctgggtgtcttgtacaacagacatttatttctcacggttctgtaggctggaattctaagagcacagtgccagctgattcgggccctggtaagggccccttcctcaattgcagaaggccgccttctctctgtgcccttatatggcagagagaggaagcaagccctgtggtatttcttcttataagatcactaatctcattcttaaaggccccaccctcgtgacctaatcacctcccaaaggcctcatctccaaataccctcacaatggggattagggtttcaacataggaattttgctatcgacattcagtccatagcagtcactctccgtctttcccatcccctgccaaccagtaacctactttctctctctatggatttgcctgttctagatattccatacgaatggaatcttacaatttgtgacctttgtatctggcttctttcactcagcagaatgttttccggcttatccatgttgtagcgtatgtcagtactttgttcttttttgtggctgcataatatcccgtcgtatggatagaccatattttgtttatgcatttgttgaggggcatttgggttgtttctacttttggctattaattaatagtgccactatgaacattagtgtataaatttttgtgtgaagtgacttatattttagaataaacctctgggtgctatgtagagagtcagtttttttttttttttgagacagagtctctgcttggtcgccgaggcgggagtgcagtggtgtgattttggctcactgcaaccttcgcctcccaggttcaagcgattctcatgccttaggctcctgagtggctgggactacaggtgtataacaccacacccgaataatttttgtatttttagtagagacagggttggccaggctggtcttgaactcctgacctcaagtgatcctccagcctcggcttcccaaagtgctaggattacaggcatgagccaccgggcctagccagagagtcatatttgggggccagaggtgacagagcaggaagcctggcacctggccagcctcagctcctccattatctctcccgttgtcaagctctcattcattcattccctcgatacgttccttcagcattcactgagagatatttttgagcttctactacttgtcatttctaggcactggctgtgaacattctagtgcggtgaggtgtacccagaatgaatgaacacatgacctgtattttggtcaggacaagagcagatgagggggcttgaagagggcttggggaaagcgggaagcctggcttataacagagtccctgtcctaatccccagaactggttatcttggatactgggtgagcaagagggtcagaatcagacaaggagatgtgacagcagaagcagaggtgagtgagagagatctgaagatgctgtgctcagctctagaggtgaaggaaagggccaggaatgcaggcagcctctaggaacgggaagatgcaaggattttccccagaacctcccgaagagaaaccagccctgccaacaccttgattttaggacttctgtgttccagaactataagataataagtgtgttttaagttacagcagcaaacagggaactcatataccttgacttcattgccagtgcatggcccacagcaggtgctcaataaatgtttgttgaatgagtggagccgtgtctgagggcacttgatgttaaaataagaggagaatcaggggacttgccagggcagctggttaggaccccatttcaatatcaggcctatggtgttggaggcctgtcccccttccgtttttttctcccaacagctcagagatctttgggttttctttcagcctgggagcctcgatctgaaagccaagcatcacgcaaggaagagggcctgcctgaagaggagccatcccatgtcacgggaagggaaggattcccgacagatgctccttatcccaccacgttagggaaagacagggagtgtcagagccagagtctggcactcaaggagcagaataacttgaagcagttggaatttggcctcaaggaagcaccagttcaagatcaaggctacaaaactctcagactcagggaaaactgcgtcctgagttcaagcccaaatccattcccagagatctctagaggggagtatttgtatacttacgactcacagattacagactcagaacataactccagcttagtcagtcagcagacaggctccccaggaaaacagcccggtgaaaacagtgactgtcacagagattccagtcaggccattccaattacggaactcacaaaaagccaggtgcaggacaaaccctacaaatgtactgactgtgggaagtcgtttaaccataacgcacacctcaccgtgcacaagaggattcatacgggagaaagaccttatatgtgcaaggagtgtgggaaagccttcagccagaactcctccctcgtccagcatgagcgcatccacactggagacaagccctacaagtgtgccgaatgtgggaagtctttctgccatagtacacaccttaccgtccatcggaggattcacactggggagaagccctatgagtgtcaggactgtgggagggccttcaaccagaactcctccctggggcggcacaagaggacacacactggggagaagccatacacctgcagtgtgtgtgggaaatccttctctcggaccacttgccttttcctgcacctgagaactcacaccgaggagaggccctacgagtgtaaccactgcgggaagggcttcaggcacagctcatccctggcccagcaccagcggaagcacgcgggggagaagccctttgagtgccgccagaggctgatctttgagcagacgccagctctcacaaagcatgaatggacagaagccctgggctgtgacccacctttgagtcaagatgagaggactcaccgaagcgacagacccttcaaatgtaatcagtgtgggaagtgtttcattcagagctctcacctcatccggcaccagataactcacaccagagaggagcagccccatgggcgaagccggcggcgtgaacaatcctcgagcaggaactcacacctggttcagcatcaacacccgaactccagaaagagctctgcaggcggagcaaaggcagggcagccggaaagcagagccctggctttgtttgacatccaaaaaatcatgcaagagaaaaaccctgtgcacgttattggggtggaagagccttctgtgggtgcttccatgttatttgacatcagagaatccacataggagagaaactttgctgatgacttttaaccacaagtaaaaaatgtggtaagtccacatagtgtactcatggaaggaggggctgggggtagaaatgtcatgggtgacttctgactttctaaggaaatgatgcttcccaagcacccgaggttggttggtcccaaatctatcaaactcagtgccctctttagcgacatattttgtgacattccttccattacaccacagtgagttcacaggtaatataacctacccacctgtgtaatgtcaaaaaaaatcaatatgcggccccattttgtaaaggatcattaaaatgaaagtaatttatggtagagtaaattgtagagtaacgtgtactgacttggtgcagtatttctccttgtcactgtgggcccaattttgccaggagacctagggcaatagcctgttgcttgtggactggtagagggtatgatgttgaccatggcaatactgtgaggggccttcccatgtggaacgtgaccttccaaagtagtgactaactcttggaaaagtttttaacaacataatatgctattgcatttctgggaaattctgggtaaattccaagcatgcagcaattagtttgtgcttatgtgtgaagtccagttaggttctcagttcataccctgaaaactgcttattccacatctgttgatgtggtccactgggggcagttctgttcctcaccatcttggcagcatgcatggctcctgcccacatttcaaccacacccccaacccaattacgtgaccagcccccacgaaatttcacagcattccgtgcaggggagtgtcacagctcctcttgaaaaacatctggtgttgctatgagccagaagttcttttttttgttttttgtctgagatggagtctcgctccgtcacccaggctggagtgcaatggcgcagtctgctcaccacaacctccgcctcccaggttaaagcaattctcctgccttagtcccccgagtagctgggattacacgcacctgccaccacgcccagctaatttttgtatttttggtagaaatggggtgttggccaggctgatctcaaactcctgacctcgtgatccacccacctcggcctcccaaagtgctgggtttacaggcatgagccactatgcccagctgagccagaggttcttaactggtggtgcttttgcctccagggcacatttggtgacatctagggacatttttggttgctgtgcctggaggaagggtgccgccgtcatgtagtgggtagaggccagggacgctgctcaacatcctttagtgcccgggacagctcctcaacaaaggattctctagctcaaatgtcaatagtgccaaggtggagaagccacctgggtataaacccagcccagaaatgtagctgacatttttaaaacttgcagccagctgtggtggctcacgcttgtgatcccagcactgtgggaggctgaggagggcggatcctttgaggtcaggagtttgagactagcctgggcccatggcgaaaccccatctctactaaaaatacacaaattagccaagtgtggtgacatgcgcctgtaattctagctacctgggggaggctgaggcacgagaatcgcttgaacctgggaggcagaggtttcagtgaaccgagattgcaccactgcactccagcctgggtgacagagcaagactctgtctcagaaaaaaaaaagaaaagaaaaaaaaccttcaaattgattaatcagggctggactagactagaaatcatataagcttgattttaacagatggcatcattagctagtttatacatgatgtactttttagtacatcctttacggttttgcagcattcataattgatgtgaaataaggaagataatcctttttttttttttgagacagagtctcactcttttgcccaggctggagtcagtgttgtaatcactgctcacttggcagcctcgacctcctgggctcaagtgatcctcccaccccagcctcccaagtagctgggaccacaggcatgtgccaccattcctgattttttttattttttgcagagacagggtctcactgtgttgcctaggctggtctcgaaccttggcgtcccaaagtgttgagattataggcatgagccactgtgcccagccacttatttttctgagtaacctttaaggatgtattgtggacattttcaaacatgagtcatatatttttgctggtactcccatctacctccccaccattctccttccctggatatatatataaccatgtttgtccactgggacaaaaccattttcacaatcatactaagctgtcatttcacatttttgctgtgcactgatagtgtgaaagcaatggcaggtaaaactgctgagcctgagttcaaagcagggcagtagccctgaggttggttgttcatattcttctccactgggaaatgcagtaaagaaaaagaaaagctaatttcacttaatttcttttcttttcttttttttttttttcttttgagacggagtctcgctctgtcgcccaggctggagtgcaatggcgtgatctcggctcactgcaacctccacctccacggttcacgccattctcctgcctcagcctcccgagtagctgggactacaggtgtgcgccatcttgcccagctacttttttgtatttttagtagagatggggtttcaccatgttagacaggatggtgtcgatcttctgacctcataatccgcccacctcggcctcccaaagtgctgggattacaggcatgagccactgcgcctggccctctttttctttttgagatggagtattgctctgtcgcccaggctggagtgcagtggcacaatcttggctcactgcaacctccgcctcccgggttcaagcagttctcatgcttcagccctctaagtagctgggatgacaggtgtgcgctaccacacccggctaatttttgtatttttagtagagatggggttttaccatgttggccaggctggtctcaaactcatgacctcaagtaatctgcccgcctcagtctcccaaaatgctggcattacaggcatgagccaccgtgcctggcctactttcactgaatttctgtgatgaaacgggaaaaattaattttgttaaatctcaagtagaactatattgtcattatcacatctaaacagatatcatcaaatacctagtgttcagatgttctgggttgcctcataaattttgttttctatttgtttcatagtaatcataatctaaacaagatccacacagtgcatttggttggaatttttcttttttctttttcttttttttttttgtgatggagacttgctctgtcacgtggttcactgcaacctcccaggttcaagcaattctcctgcctcagccgcccctgtagctgggactgcaggcatgcaccaccacactcagcagatttcttaattgtttgtagagatggggttttactacattgcctaggccagtttcaaactgggctcaagcgatcctcccaccttggccatccaaagtgctaggattacaggtgtgagccaatgcaccctgccaaacagcaattttttttttttttgagacagagtctcgctgtgtcacccaggctggagtgcagtggtgcgatctcggctcactgcaagctccgcctcccaggttcatgccattctcctgcctcagcctcccgagtagctgggactacaggcgcccgccaccacgcccggcaaattttttgcgtttttagtagagacggggtttcaccctgttagccaggatggtctcaatctcctgacctcgtgatccacctgcctcggcctcccaaagtgctggggttacaggagtgagccaccgcgcctggccccaaaacagcaatttgaataaccatgttggaatggttgagcattggaacgcattagcatcagaacttcccgtgtcaggccaggcgcggtggctcacgcctgtaatcccagcactttcggaggccgagatgggcagatcacgaggtcaggagatcgagaccagcctggctaacacggtgaaaccctgtctctactaaaaatacaaaaaattagcctggcgtggtggcgggcgcctgtagtcccagctactcgggaggctgaggcgggagaatggcgtgaacctgggaggcagagcttgcagtgagctgagatagtgcctctgcactccagcctgggtgacagagctagactccatctcgaaaaaaataaaagaacttcccgtgtccgtttttgctttttggatgctgggagtgtcacaactcagctatccaatcaaggcagagctggcctccaggatgccagagccagagctttgtggttcatctctagaggttcaacaggaccctgtggatggcccaagttcgtttctctgcacttacctcttcggggttgtcctcaaaacgttgccgtgtcagctctcacttttcacagcaactctggcctcctaccttggactgcgccacttctgtctccttagataacctccattcgcatagctaaatgctgcaccctccgacactgccacaataatagttctgtgagttagtaccattttatagataggcaaaatttggcacaggacaaaagttagtggtaactagaacaaaagtaaccagcccaagctaggaagtggtggagttagaatttgatgtcagcacccagctgaccatggcttaaacagatgaggctttgttcaaaggctgtcttttcagtggctcagctgtgtcacagtcgatgttttctgcaatctctcaacctttccattgtggtcatgaggagactcctatggctccagccattgcatccacagtgaagactgaaagaagggggaatgggcaggccaacacttaccgctgatggtgtttaaaggaaaaacattcccagaagcctgcagcacatgccccccttagtctcactggccacagatgggtcagggggccacccctaataacaacggggcttagaaacctcgtatttacctttctaacctctgtggtggagacaggtgggagagaaaagtcctgggaagtggatgatggaggcagctagccgtagctgctgcttttctcttcaagctcttgggagaattgcttgtgctccctattcccttggtggatgatggaggcagctagccgtatctgctgcttttctccttcaagctcttgggagaatcgcttgtgctccctattcccttggtggcagctcacacctcagacctgctgtccgcccccactgcttcacagaacccactgcaaccactgtccaaggtactacctctggtgtcgtctctcttcatccccaggactgtgaagcctgctaacctctttgcagagctccatctccttgcattgtggggttccttctaactcttcagggacttctcaacctcccgtcacccttcctaaatgctggggtcctagagtccaccttgtgctccacgccctccccaggtgtcatctacatccctagctttgtgctgctcaccaccaaatcagtctggtgcttctgagatttgggcttcagacccaaacaactgctgtgtgctactgggcaactccccgaggtgtgccgaaagctccccaaacccagcctaccccaaacaaaactcattttccacccagactagtctctgcttccctgatccctttcctggaggctgtttccacttgccatcccatcatggaagccagaaaaccagtcttcttgacctctccccttccccactccatggagttagaggtcctgttgattttgccatgtaaacatttcggatttgcttacttcatccccactgccaccaacagtgcaggatggccctaagaggagaagtaatgtgctaccaagtggcccagccagagtgtgaaccaaacagtctggtaccaaaaccctattctggatcattcctcctttctgctccaccagcagtttggggcacaggcttgggaatccagacaggaaagctcctcccctctgaagcagtgggaccaaaaatgacagcatggttctagacagctctggaagtcaggcctgtgattgcctcattccctccaccttggcccccaaaatggccagtcctgaaggggtcacagttgatacttctctgagggggcatggggttggctgaggttatagcagccccacagggtggtaagctgggatgaagcaatcaactggaactcaacaagccttgagttctcaaagggggtgtgggaaggttcttatacatcttctatgaagggcagtttatcagtcactaaattacaaatacataaaccctttgtctcaccaaacctgctgggaatgaatcctacatatatatttatatgtgtgcaggctacatggttttcattatgctattgattttaaaagtaaaaatttggaaagaacctccatgtccaccatggggaactggctaagtcatttatggtggaatggtgatcataaaaattcattaaaaatgaagactctatatacagcttgaatattccttatcgaaatgcttgggaccagaagtgtttcagatctttgcatattttctgtttctcatttcagttcacattttctaagcatgatattcctactgatttccttgtagatattttgaaacagataagaaactcctccgtggaaattactgttaactagggaaaagacatgtttttttctgttcataaaagtaatgcgagttctttgtagcaaaacttggaaaatgcataaaagtaaaaaaaaaatgaaaacttgtgtaaaattcctcatactttagccatccatagatggtccttaccattaggattttactaattttccttgcagctttttcttaaaatatacacgtgtgtctacacatacatagtgtacactaaattttacatacacacagaggaatatatatgtgtatagttatcttgtgtttagaaatttggaatcccttctagttgtcttgtaacatgtgcttactctattttgaggattttctctatgaatttcatgtagctctttaaattaactttcaggaggattgtaacaatgtgctctccacccagtattttaccagccttgagttttctcaaagggggcattggaggggttcttatacatttacagtgggaatgtgaattgatacaacttctgtggagggcagtttatcagccactatctaaattacacatacataaaccctttgtctaagcaaacttgctgggaataaatcctacacatatatttgtatgtgtgcagactgtttgtacatggttttcattatgctattgattttaaaagtcagaatttggaaacaaccctccatgtccaccatggggaactggctaagtcatttatggtggaatggagatcatagccttaaaaatgaagactctttatatacaggttgagtatcccttatccaaaatgctcaggaccagaagtgtttcagatttcagatttttgaattagggatcctcaaactatactaatgtgagaaagagctctaagatagttaagtagataaaagcaaggtgtcaaactgtagagtatgtttccatttatgtaaagaagaaacaggctaggcaaggtgactcacgcctgtaatcccagcactttgggaggccgaggcgggtggatcacctgaggtccggagttcaagaccagcctgaccaacacggtgaaaccccatctctactaaaaatacaaaagctgggtgtggtggtgcacacttctaatcccagctactccgtaggctaaggcaggagaatcgcttgaacccaggaagtggaggttgcagtgagccaatattgtgccattgcactccagcttgggcaacaagagcgaaactccatctcaaaaataaataaataaataagaaacatttgtttatatgtacacacataatctctgaaagggtaaaagtggcatactggttggccagaagaattgggaggacagtgatgaggaataattttcactctttatcattttatatttttggaattttgaaacatgtaaaattattaccagttcaaaaaataaatttaaacaaaaatcttaactgtttcaaattaaagtaagtttgataatttctttcattgtttactgtctgcatcccccatacagtgttcacatgagcagagagtgtgtgtcttggtcatattcatacttgttctatatatactcgtgtgtgtgtgtgtgttcagttgacagaaacagttgagtgtaaaacagcttcaactcgatgataccaaagatacaagataaaggtccctggagggtggctgtagcgcacacatacatttccaagttactttgttaaatttcctgtatcaatgagccccaattatgagagccccctacatacaagttttagccaatagccaagtcccccatttccagtgttatcttcatgtcctccaaggtattcaagttgtttctgcaatgggtaactgggaagaaatcagcatccagtctgaaaagcagtctcccataggtcttttgtaaggagatccaacatggacatcttccagaatgcactgtacaacatggtagccactagtcatgtatagctatttagatgtaaatttttttaattaaaaaaatttttcatttatagcaacagggactcactgtgttgcccaggttggtctcgaattcctgggctttagtggttctcccactgtggcctcccaaagtgctgggattacaggcgtgagccaccatgcccggcccagagctgatagaatttttaaagtccccctgtgatgatctgactgtggtaggagtagggaggtgtaacccgagtcagtatgcacattgggagcctcctccactaggtcatacaggccttctgcgtgtagatggaattatcatgtcccacactgtaccccggcacctccctcgattaaggtgatttgcatcatgcagggcctgcctgttatcagagagtctcctggacatacagaaataggaatgtacagggactgcatacacctgttgctcaatttctagctaaatggctggaggtgggggataaagaaatggcattcatacggtgtaatactagccatgtttcagaaagttttcaaaaaatgtttagtggagaaatgtgcagggtcagtggaagaaaacctgtaaaattatattatgattgttttatactctatacggacaagcctaaattggagggcattttggaaaactcgcttggatacatgaaaactgccaagatcattataaagaaacaacaggatccattctagattgaaagcaacttgaaatgagacagtagagtgtaatgcgtgtttagtttgtgcttgaataaaagacgaaaactacgtaagacattgggacaactggagaaattagcatatgggctggggattgggtacaggcttcaatgtcgttacttgggtgagttgaagaatgtacgtgttcttaggggacatctgcttaaggatatacaaggttcaggggggaaaaatatctccaaacgatatacttttatatctatgtgtgtacatgtgtgcgcgtagagaaagaaaaaagtacatacgctgtatatttcaaagaacatataaaaccatggatgtcaatatacttcccttccggtgcgctgcctgcgcagaaccgagaggttctgacgatccgcagctcccacgctccccttccggccccgcagcgctgtgaactccatttcccagaaggccttgtatcccgtgcatggccgtttccaggcaggaaggcgaagggccttctgggaggtgaggtcctgggcggccgctggccaccaggcggaagtgcgtaccggaagtgccggcggcagtgtgtaagacgctcacgggcgcgcggactatcgggcggctaggctctctgaggaggctgccacagtggtgagtggtgtgtggaggagaggcgagggtgattgtgagggatggagaggcgcccgtggcctaagtgtgctgatggtgggagtgaatgagtggacgggtgggacctgtgaggggaacgcgaccccgggtcggcgcgggcagagaggcgcgcggtgcgtgagggcgcgacctgccatgtcctgccgggtgtcaccgcttatgcgcccgtgggaggggagcattctgtgttggaggcagaaggaatgagggtcgtgaccaactcattataccactggaggctctatgagcaaaccgcaaactgttctcatgaaagcaggatgttggtaaactgacaaactgcgtctgccgccagaaggaatgctgggggcagtcatgtcccaggtcccctgctccttgaggttatctacaggaacatctggaacctgctgaacaaagaaagcagtcatgtgggcctgtgttaaatcaaatagctgaccgtcagttaccctttcctccctattcagtctacctaacaaatatgaagggctgtaaaagctcagggccctgttccctagaatctaggagccccctgaccccttctttcaaacagatccttttgtctttgtcttcatttctgccttcgttctccttcgtttggtccagaagcaaccgtgacaagtggtgcccgaccagggacctgaacgaggaaggtctgccagagcagagaaagtgaaactgatcagacgaactacgaacccctggacgggagagtctgccggcggagaatataaggtcagttccctgagaaggtatcgggagcgggaggtttctgaatcagggtaacatggggcagaatctgtctgttgaggagcaacattatgtgcagctgcttaaagttttacttaaacaatctggtgctcgggttagttctcaaacattaagcttctgcaggaggttattacacataacccatggtttctgcagacaggtactcttgctgtggaaaattgagactgagtaggagaaagattgaaacgagctcatcagaaagttcttaaagtggatccttctattttctctgcttggggtttggtctgtactgtcctcctgccattgtcctcttcttattctgccagacagcaggtgctatgttctgaatctcaaaaattgaaagaatcttttgtctcaccagcagcgcccattgaaaatgataaacaggagagggaggatgagaactggcctgtactgtcccctccagtagcagaaatagagaccccagtacaaaaaattctacatgctgtggccatagctggcgagccactaggaccttgcacttttcctattaccttaaggcctgatccaaataatccacagcagtttattcatgaacacactccagtaaaatttaaattattgaaagaattaaaagctagtgtggttaataatggaatacagagcccatttactttaggattgttagaatctgtattcagcactatgcgcctcccacccttggatataaagcatttagcttgcacttgtttctctgctagtgcatatttgacatggaatttaaattggcaagaaatgtgtgcagaccaggctagacagaatctcaccgctggacatgggaacattacagaggaaatgctattgggtagtgactcttattcagatctggtgcaacaattgacacttccagatgctgcttaccatcagtgcgcctggccgctaagcgtgcctgggccaccattcctgagaaaggggtctcaataaaatcttttccgcatatcatgcaaaaatcacaggagccctttgcacaatttattgcacagttacaacagtcagtgaggcatcagattcctcatactgctcctgcgaaaatgcttactttgaccctagcttttgaaaatgcaaatgcagattgtaaatgtgcattagcacccgtgagatgtacaaacagcttgggaaattttctcaaagcctgtcaggatgtgggaactgaactccatcgttcaactgtgttagctcaagtaatagctaatttagtagtgaacaaatctgaaaagggccaagggttgagccctaaagtgggaaaatgttataattgtggaaaaattggacatttcaaaaaagaataccatcagacctctgggcagaagggatcttacaatgcaataccgcccccccctccccgccccgctccccccaacacacacacacagaaaaaaaaacaccaggactttgccctcgccgtaataaaggaaatcattgggctaatcagtgttgctcaaaatttcatcagaatggcaccccgctctcaggaaatgagaatggggcctgggcccctcaaacaatgagggcattccccatccaggccacaaccctgctacaggggtgggttcctggaggaacattgactccctctcctctggaacaccggggagtgcaggattagatcgctcagtcagagaatgggtcacgttagttggaggagacaaacccaccagaattcccacaggcatttgggaacctttgccaacaggatatacaggattaattttaggccaaagccatctgaacttacagggcattactgtgatccctggattgttgactctgattatgaaggagaaattcaagtaattgtaatgtcacaagatctttgggtttttaaacctgggaaatatattgctcagctattgcttattattattctctgcaaattacacccttcttcacgaaaggagaaaagaggaaatcaagaatttgggagtacaactacacaggaaatttacctatcccaacccatagcttctaattgacccacctgtgcagtgcaaattaaaggaaagaagtgttgtgggtgtatggacacaggagcagatgtttcagtaatatccaaaaacaattggcccctgctactaacctctgcatccttagtgggagtaggaacagctcaaagtgtttaacagagtgctgaaattttactttgtgtcagtccagatggacagccatgtacttttcaaccttatgttgcaaatatacgtgttaatctctggggctgagatttacttacagcatgggatgtgagacttacaaatgaaaaggttgataatccaggatttaaaatattgaaggaaatgggatatcagagtgggaaaggcttgggaaagttcctacagggaaaccccggtccggtatcggtaactgggcaaacagataggaaagggctaggtcatcaggatttctgataggggtcattgatacttcttctccacccactgccttgctgctagagtggctgactgataaacctgtgtgggtggatcaatggcccctatcacaggagaaaactgactcaactccatcagctggtaagaaagcaattggatgcaggacatataaaagtatcagttagtgcttggaattcaccagtatttgtgacccccaaaacgtcaggaaaatggcaactgctgcataatttgagagctgttaatgcacaaattaaaccagtgggtgcattacagcaaggtctgccatccccggcaaccattccaagagattagcctcttgtagtaatagatcttaaagactgttttttcactataccattacacaagaaggacaagcctcaattcgccttctctgtgccttctattaatcagagagagcctgtctcttgtgatcaatgaaaagttttattaccccaggcatgctcaacagtcctacgttatgtcagcattttgtaggaaaagcattgaaggagcctcggaatatgttttccaccacctacatcattcattatatggataatattgttttggccactcctacagatcaagtattataccagttattcagagaaataaaatgggctttaactaaatggaatctcaaaatagctcctgaaaaggtacaaacaacctcctcataccaatacttagatactactgttactgaaaaaagtattcagcctcagaaagtagctcttcgtaagaacaaattacaaactctgaataacttaggggatattaattggctgcgcccaatgctaggtattgcttcttatcaactcactcatgtttatcaaaccctccaaggagattcttcattagattcccctcggcaacttactaaggaggcagaagctgaattacagcttgtagaaagatgcttcagcaacgacatgcctcctggctacaaccacaaaagtctttggttttgtttattcttcctaccccccattctccatcaggacttttagctcaattcatagacaaaactataatggtaatagaatggctttttttatccagtcaaacagtaaaatctttgcaagtttatcttgctttagtcacacaacttataacaataggcaggcatagatcaaaaatgcttacaggatatgatcctgataaaattattgttaccttggattcccaacaacaggctgcggcctgggagatgtccactgcatggcaaatcactttcgcagattttgtagaaataatagataaccattatccatcagacaaaattttgcagttttataaaattcacccttttattccccctgtgattgctcatcacaaacccatttcaggtggacagacctattttaccgatggctcttccaaaagccacacagccatttatggacctaaatatacttaaataataaagacccctagagtttcagctcaacactctgaattaatggcagttattcaagttttaaagctcacagctttatttcctattaatattgtctgtaattcagcctatgtcgtaaatgtagctagttgcattaaaactgccactatcaagagtgtacggaccagccccacagggtcggtgggtctctccctgtgtgcggcgacgagagagtgtagaaataaagacacaagacaaagagataaaaggcagctgggcctgggggaccactaccaccaatgcgcggagaccggtagtggccccgaatgtctggctgcgctcttatttattggatacaaagcaaaaggggcagggtaaagagtgtgagtcatctccaatgataggtaaggtcacgtgggtcatgtgtccactggtcagggggcccttccctgcctggcagccgaggcagagagggagaggagacagagagaaagacagcttacgccattatttctgcatatcagggactattagtactttcactaatttactactgctatctagaaggcagagccaggtgtacaggatggaacatgaaggcggactaggagcgtgaccactgaagcacagaatcacagggagacggttaggcctccggataactgtgggcgagcctgactaatgtcaggccctccacaagaggtggaggagcagagtcttctctaacctcccccagggaaagggagaccgccccccaccctttcccggtctgctaagtagcgggtgttgttccttgacacttttcgctaccgctagaccacggtcttcccaaacgctggcgtcaccactagaccaaggagccctctggtggccctgtctgggcataacagaaggctcgcactcttgtcttctggtcacacctcactatgtcccctcagctcctatctctgtatggcctggtttttcctaggctatgattatagagcaaggattattgtaatattggaataaaaagtaattgctacaaactaatgattaatgatattcatatataatcatatctaagatctatatctggtataactattcttgttttatattttattatactggaacagcccgtgtcctctgtctcttgcttcggcgcctggatggcttgccgcccacacaagagcaccttaaaaccagaactgcttaacctatttctgagactccaaaaagctgttcgctctcatgctgccccttttcatatttctcatatccgatctcacacacaacttcctggggccactatctctaggtaatgatagagcagataaattcatcagttctatatttcaacaagcccaagcttcccatgctttactgcatcagaacaacttgcccttactcgtatgtttcatctgcctcgcagccaggcttgagttattgtgcaagcctgccccacttgccagcatgtccctggtgttgcacctgtggaaggatgcaacccacgaggcttggctccaaatgaaatctggcagatggatgttacatatatatagcagcctttggctaactccgctatgttcatgtaatatagacacttactcccatatgttacatgccacatgccaaactggggaaacagctggtcatgtctgacgatactgtctgtcgtcatttgcccatatgggggtccctaaacaatttaaaactgacagtggactcgcttatgttagtcatgctttcccaattttttacaattgtgggcaatcaatcataaaacaggaattccatacaatccctgagggccaggcattattgagcgggtacatcaaacactacaacgcatgctgaaaaaacaaaaagggagaataggggaccaattaccacttcaaacaaaattacatttagccttgtttactttaaattgtttgactcctggtacggatggcaagaccccagcagaacgacactggcaactgctagaggaaaagaggcaagtttatccaaaagtgttatggaaatccccagaagaaggacaatggaaaggtccggtggatttgctgacgtggggacgagggtatgcttgtgtttttacaggagatggacaaaccgtgtgggtgccctccaggtgtgtgtgaccatggaacgggagaccggagggatccatggtattcaaccgtgggcctgttacctccagtacgagccatgagccagcggaatctgaatgcaaagacagaacaagggccgaccggagtcacaatgacatccaaccccataacatggggacagatcaagaaaacgacacaagaagctgagaaactactggagcgccagggtcaggcaaaaacccctgactccatgttcttggccatgctagctgtagtgtcctgtgcggtatgtttcccctgtgtagaggcaaaaacatattgggcatatgttcctaacccactggtagtacgactggtactctggagcgacactcctcctgagatatattatgatcagggagcgtgggcaccaggacccctaactccgtctgacacagagcaatagcatcaattacaccggcccattggaaggactccctttatgtatcaccatggatacgtcactcaactgcagctgtcttgcagtccaatctcaggcatggttaagtcaccatggaaaaattatgtatttattaggcctcagctttattaatgttactggcgtgttcaccaatcactcctagccccatcactcaaattgtatggattatatggaatgggctccctttgatatttctcacccccctccttggacccagtgtcttggccccttggccagacaacagtctatgttaatgggaaacattgactggggtccccgtggccatttagaggggagagatgaaaatcagacctcttggcacaaacttcactggcactggtggtggaccttcaacacctcttcatcacatcacactgggattcagtcccccagttggctgcacaacttgcttggtataggacaggctttaacccgcccttacctcagtgacgtcatctaggaaacagaggcccaattcaggaatcgatatggaaggcaacactcccatttatgaataacagcatctgggtcagaacattatccaacaatagtaatattactcaacacagttttaatatcacctttgtaaaaaatattaccactcaatttacggtttgtgggttttttgttgttgttgttaactgtttgagatggagtctcactctgtcgcccaggctggagtgcagtggcgcaatctcgggtcactgcaacctttgcctcccgggttcaagcaattgtctgcctcagcctcccgagtagctgggattacaggcacccgccaccgtgccaggctattttttgttttttgtatttttaatagaaacgggatttcaccttcttggccaggctgctcttgaattcctgacctcgtgatccacccgccttggcttcccaaagtgctgggattacaggcgtgagccaccatgcccggccagtttgtgtttttaatccctatgtttttctagcatctaagaaggaccaactccacgtaaacatcacccagttgacttgtgactcttgtcaactgtatcactgcctcaatcatagcacaatacaaacacacaacatatccactctaataattctgggtcgtatccctggattatggatccctgtcaatttgtgcaaaccttgggctgccacccctgctttacattttgtaaaactccttcttacccagctcactcatcgtgcacgtaaagccttaaacatagtaatttttactgtaatctccttagtcacactaataacctcggttgtagtgtcctcagtagcactacatagttctattcaaacagcccaatatgtagaaaattggacatgtacagccaaccaggcatggatgcttcaaaataaaattaataccgaattacaaacaaaggtagcaatgttaaaggctactgttctgtggctgggaaagcaggtacaaagtttgcaattgtagcagcaattgcactgtcatttcaatcatattcatatttgtgtgaccaatttggaatagaaccaaagtgaatatccatggaaccttgtaaaagctcatttgcagggagcttttacatccaatattacttttgatatcagtaacttacagagtaaaattcttaacttgaataagcaaactcaaaaataacagccctttttagaagcttaaacagaattccagcagggcttagaaagcctcaaccctggccgggtgcggtggctcacgcctataatcccagcactttgggaggccgaggcaggcagatcacgaggtcagaagatcgagaccatcctggctaaaacagtgaaaccccatctctactaaaaatacaaaaaaattagctgggtgtggtggcgggcacctgtagtcccagctaatcaggaggctgaggtgggagaatgacgtgaacccgggaggcagagcttgcagtgagccaagatggcgccactgcactccagcctgggtgacagagcgagactccatctcaaaaaaaaaaaaaaaaaaaaaaaagcctcaacccttggacctaccttaaacataacttcaatgtctcttttataataattacaagaataatgttgttatgtctctgtttttttgctcatagtctataggatcgggtgaaccaccaaccggcaattgaaagctgcacagcctgaaattacctttattcaattaatgcaaaaacaaaaggggagatgttggaggccgaaggaatgagggtcgtgaccaactcagtataccactggaggctctgtgagcaaacagcaaactgttctcatgaaagcaggatgttggcgaactgacaaactctgtctgccgccagaaggaatgctgggggcagtcatgtcccaggtcccgtgctccttgaggttatccacaggaacatccagaacctgttgaacaaagaaaggaatcatgtgggcctgtgttaaatcaaatagctgaccgacagttatcccttcctccctattcactctacctaataaatatgaagggctgtaaaagctcaggtccctgttccctaatatcaaggagccccctgaccccttctttcaaacagatccttttgtctgtctcatttctgcattcgtcgtccttcgttcggtccagaagcaaccgcgacagtcctgcatgtgttgatgccacctgtatgtgcaggtgtgacctcaggtgtgtgagtatccctcataccccttatcatcactgcctattcgctcttcctccagcctctggcaaccactaatccacgttatatgtctagatttgcctcttctggacacttcatataaatggagtcatacaatatgtggtttcttgtgtctggctttttaccactgaacgttttcagagttcatccatgttgtagcatgtatcagtttttcattcctctttatggctgaataatactgcattgtatggatataccacagtttgtttactcattagttcatagacattggggttgtttccaactctctgatattataaatgctactgctgtgaaaattcatgtacaggtgtttgtgtggatgtatatttttaatttgggaaggggaggccatgggtgggacctaggcttgtgaagagcctggcctgggtgtatctgtttgtccgaggagtgcctgtatgcatggccatgaccacacccactccttgctgcctgtgctcattagccatacttcattttccagaatcccaggcctgggcccctgaagtcaaagccaggagcctagagccacactgatgtgtaggatcaaagagaaggcggcagtggccctggaaacaaacctgtctctgcaagagtcactagcaacctgggacctctgcccaggactgagacctcgggtgccccctaccctgtagctgctgaggccaagcaatgtggagacagagagagggtgaggtgatggagcctgaggtgccgagtgaggtagatggtggggtggcagtcacagtggcacaggaggcaggtacagggctagatgttttcagaaaccagatatccctctaaaacacaccctgcttctgctgccttcattccactgccctgccttcctcagcctgctctacaccactacctcctcatggttctcctgcctcccgttgcccccttcatcactctccactcagcattgggtagagagggtcttttacccctgactgatgaggccacccctctctttaaaccctccatcactgcccaggccatcagagtatggttggcaaactcttctgtaaaacacaagcagcaggctgggcgcagtggctcatgcctgtaatcccagcattttgggaggctgaggcaggcctgaggttgggcctatgagaccagcctggccaacatggtgaaaccctgtctctactaaaaatacaaaaaattagctgggcgtggtgatgcatgcctgtaatcccagctactcgggaggctgaggcaggtgaatcgcttgttcccaggacatagagattgtggtgagccaagatcgtgcctttgcactccagcctgggcaacgagcgaaactctgtctcaaaaaccaaacaaaaaacacacaagcagcaaatgtcagctttgtaggctcagagagaaaaccaagaatgttacaaaggtacctatctaacaagagaaaaacatgtccatacattttattaataaaatccaaaactttgttaaatgtaattcattccttaatgagcaaaaagcttttcacaggaggttccattttatagataggaaacagaccccaagggaggtgagcagcccagaattacagcagagagtggtgaagatttgatcctagatctgacagcctctaccatcatacttgccattctcagcttaggaataagatggggaggaaggtgtgggtaatgggcaaatcagggcccaaatagtctgttcagtactcttgtctcgtgggaaggaacaaaaggccccacatctgcccttcctcctgggagtctctgttaggacctgaattcagtacagcaggaatgatcaatttttctctttagagcactcacccacttgacatctcactttgttctcacatagtcctcatagaggtatcctgtggctgctgtccttgaagcctgatagcatggagctgaggcctcagactataacagggcacataattttcatgaagttcaagaagaggctgggctgggcgcggtggctcatgcctgtagtcctagcactttgggaggccaaggagggtagatcacctgaggtcaggaattcgagaccagcctggctgacgtggcaaaaccctgtctctactaaaaatacaaaaattatcctggcatggtggcaggtgcctataatcccagctactcgggaggctgaggcaggagaagcgcttgaatccggggggcagagcttccaatgagccaagattgcactatttcaccccagcctggacaaaagaggaaaactacgtcttaaaaaaaaaaaaaaaaaattaggctgggacacctttcctggaagggctacttactacaggggagctgtctaaggtgctgaaatgtcctagccctgcgctgtccaatatggtagttatgattaaattcaaataaaattacaagttccatgtcccagtcacaccagctatgtttccagtactcaggagctacctgacactgatggtgccatattggacagcacaactccagaacttttccatcctcacagaacattctagaatttaatttgaatgctagttacacagggctgtgcatttaccaaattcactaagctgagcacttgtaattctgtaaaacatgtatatgtatttttgaaagcacaaagtttcacgtccccgcctgccagtcactttaccaaacaacctttggtttaacttctctgtgccccagtttcccaacctgtaaaagagagtaatgatacctcccctttgattggttgagagtaccaccaaaggtgtttgctgggtggcctgacctgcaggaggtgctcaggaaaggggagctgctgctgtcatttggtggaagtgggtccccttatctggctagcagatgccttgagttatggtgagtatgatggggacagactcccaggaggatggaatggcatcactctgtggaaagactgtgaaacagaacacgaacacctcatggcatctttgctgcctagagccatgccacttgcacaccctccttctgctcctgactcccaggaaggcaagggggtcactgggcttggggctccacagaaagaggcttcctgatttgatgcttaagagctgtgcctcagacgcctgcctctaaaacagaaagccgtccacacagacaccccacctcatctgggtacctcctctggacctaggctgggtccccacaggcagccacagccatctatgctgctgcccccacactgcctctggctgtgggcttctcgagggcttgctgtgtgatgctgagttccttaacgtggagacaatgtgttggagtgtggcagtgttcaggccctgctagccaaataaggggacccacttccaccaaatgacagcagcagctcccctttcctgagcacctcctgcaggtcaggctgctcagcaaacacctttgatggtactctcaaccaatcaaaggggagctatcatcattaccctcttttacaggttgggaaactggggcacagaaaagttaaaccaaaggttgtttggtaagtgactggcaggcagagatgtgaaactttgtgctttcaaaaatacatgtatattttttacagacgtacatgtgctcagcttagtgaggaaactaggaaacaggcccagagctgggatatggtcagtcagtggcatgaagagccgagagtggagcctggcaggaatttccagctggcatccatttgttactgaatatcagggcactcccccagagacacaagccacccctaaccacattctggaaaacgatctcacgtgtgtttccgtcctagatcaggggtgctcctgccaaggagagggtgtatgtggggaggcctgcagctgtttcccagaccttaatcagccacaaggagtccacgctggggagggtgtactgccatgtagtgggtgggaagatacctttggcaagaacacgtgccttgtgagctatcagcagattcccaacaaaaggagaccctgtacgtgcgaagagtgtggcaaggcctttggacagagaagtcaccttgttcagcacaccagtgagaagctgtatgcatgccaggaatgtgggtgtaccttcagcaacaattcatctctagtcaagcactggcacgtccacacaggcgagaagccctacatgtgtggccactgtggcaagtgcttccgagagagctcatcccttgccaagcaccagcgtgtgcacacaggtgagaagccatacgtgtgtggtgagtgtggacgcaccttcagcgagagcacacaccttgtacagcactggtgattccacaccggggaaaagccatttgcctgccaagagcagcaaagcctttgctgacttctcggccctccttgcatgccacggaacctacacgggtgagaggccctacgagtgccgggtatgctgcaaggcattcagccccagcttgtccctggctgagcacatacgctgccacacgggagagaagctgtatgcgtgtcaggaatgtgggaaagctttcagccacagctcatccctcagcaagcaccagcaggtacacacaggtgagtggccctatgtgtgtgcagaatgtggaaaggccttcagccaggggtcctacctgacccagcacctcaagatccacagcggtgagaagccgtacatacgtggtgagtaaaggaagccattcggtgactcctcagccctggtcctacaccagcgggtgcacacaggcgagcatccttatgcatgtggaaaatgtgggaagactttcagccacagcaagtttctcacccagcatgagcaagtccgcatgggagagaagcccttcatgtgtggtgactgtggaagagccttcatgcaaacctcatccctcgccctccatcagaggactcacaatggggagaagccctacaagtggaatgagtgtggcaagtcctgcatccagatgtcacacctcaccgagtattaccaggtacacgctggggaacgaccctttcagccgtggcacacacctcacgcagcaccagcatgtgcatgcatgtaccaagccattcatatgccatatatgtcagaaaaccttccaggaggccacaactcttgtactacatgagaggattccctggagagaagcccttttgagtgttgtgagtgtggcaaagccttccgccaaagcagattcctggcccagcaccagagaattcattcccagggaaaaccatgtgaatacatggatatcagaaagccctcagtgacgctttggttcttgtatgtcagtgaactgggcatgtgccaaatatggcagagatcttcccatctatccttggtgtgttgtcctttgcaccggggtggcaggtgaagagggactgtgagtgtgaggaaatcagggtcagtgtgagaagcccctattatacatttctcccttcagggtcaccggggcgggtgaggaagctgggagtgggcctaggatatgtctttcagatgtcacatggagatacttctccataattatcaaggggcacaatggccacttccactttaattagattcccatggatgctaaccaagtggtaggaggtacacaggtatgaacaggtttcctctcagcagtcctagaagactttatttcagtttttgccaagacaaaaatgaaatttaaaaaatgtgggtttttttgttttttgtttttttgtttttttgagacggagtcttgctttgtcgcccaggctagagtgcagtggcgcaatctcggctcactgccaacctccgcctcctgggttcaagtgattctcctgcctcatcctcccgagtagctgggattacaggcccccgccaccaaacccagctttttgtatttttagtagagatggggtttcaccatcttggccaggctgatcttgaactcctgacctcgtgatccacccacctcggcctcccaaagtgttgggattacaggcatgagccactgcgcccgcccaaaaaaatacatatttttaaaagatgcttttgcagttgtttgtgccttgtattaaggtagaccatatagtttggggttttattgcccagaaccaaaaaggtaaaatttatatgctgaagtgtgtgtcacagagtctagctctttaagaagaaaattttgtgtgttcctcagcttcagcatgaggacgtcactaaaactagttgagacagtgatgatgttcgttaagattttactgagcactttagaagcactttaagtagattgtcccattccatcctcttagccggcctgggatgtatttttattcccacttcatacatcagggagctgagactttgagaggttaaatcacttgcccagtgcccctagctaaaaggcactcacttttcaggacgaaaatacttgagttaatggataaggccaaggtggcagaagtatttccttcccttttaccaatgcccagaggtatttactggaattctagaactgaggaggcagttctagaatataaagtcctattgagcatgggagacaatggaatgattgggttccacctgaagaagcaagttgacccatttagctgacttgaggcaaacgcaaagtagtaactgggagccactgctcaatccagatgttgattaaatgcttcctgggagccctgcatgtgttcccactctcccctgtaacattgctcaggggttctctggctgtcaggctgagatctagcctctagctggcctctatgcgggggtccccaagatcctcaggtgtgaagattcactagaggaacatagaaaactgatatacttaacatttacggtttatagtcaaaggatacagattaaaatcacaaagataaaagatgcgtagggcagcaaccagaagagaggaggtacagctgttgtagagactgctgaattctcccagcgctgagtgacaatatagagtagcatcaaccaaggaagctcacccaagccttggtgttcaggacatttactaggtgatgatctagtgggcatggagtgcccacctgactgactttagtcacttagtctcccacccctctagtggtcagactgttacagtgtggcctaagatcctcaccataaatcacattgttgacaaatacttggcatggcccaaggtcctcaggtaaacaaagatactcttaggcagcatgatcaccacatgccttgaactgaaagaaaccagggtcacaaatgattttgttggctttctacatggaaggaaaagaaaccaaaagtattattgtagtggattgaattactagctcaattcttcactgctccttgcatatatacacccacggccatatttatggttcttcccagtaaaggcaaatttgatgtccccacccattccttgagtttgggtgtggccatgtgacttgatttggccaacagaatctaagtggaagtgatagcatgctagtcctgagtccaggcctaaagcccattgtgtctctgccatcaggatgagaagaatttttcctgtgagccttgcaagacaaatacagcagacctggacccaaactgcagcctagagccaagcccagctgagcccagcccagatcagccaaccctcagacacatgacaaaaataagcactttttttgctgtgggccacagaggtgtcgtagctgtttgttacagagcaatagctgatacaattgccaaattaaagtgaatactccctgaaaaagataaggtttgaaatctggggagaggataagaaagagacaaagggagagaggaaaggaggagcatccactcaggagagtccagaggccagaatgctgattgaacagagcacaagcacaaaaggggtggccaagggaaagggccttccaaggtctgcagtattgactacaggtgccatggtgggtgcaggagatgaatgaggagaatccagctatgcagctccaggcaagggaacattgttggtctgccagtcattcagtcattcctcagccaactcttagtacctagccctgtacaaggcatcaaggataccctggcctcggctatgtaaagggcaggacccctctcaggcctaacagcacagactcacaatctaggcagaaaaggagccaatgaggagagattccattggctttccaagtcaccctatacccattaaatgtcaaccagggctcttcttcctctccctgacaccagagtcccctccagctgctgccctatctcgctcgtttcctccttagaatctccctgaaaaggggtctaaggatccccacactgatgccactgtccattcacccgttatggactgaattgtgtccccccaaaattcatatattgaagtcctaacccccagtatacctcagaatatgactgtatttgaagataagacctttaaataagtaattaaggttaaagaagatatggatgggtcctaatccaacatgactggtgtccttataaggagagagagacagtaggggcatgtgcaaacagaggaaatgccatgtgaggacacagtgagaaggcagccatctacaagccaaggagagaggcctcaagagaaaccaaacctgttgacaccttgatctggggacttccagcctccagatctgtcagaaaataaaaaaaatttttttttttttgagatggaatctcgctctgtcgcccaggctggagtgcagtggcgtgatctcggatctctgcaaactccacctcccgggttcacgccattctcctgcctcagcctccctagtagctgggattacaggcacctgccaccacgcccggctgattttattttatttatttattatttattttgtatttttagtagagacggggtttcaccttgttagccaggatggtctcgatctcctgacctcatgatccgcccacctcagcctcccaaagtgctgggattacaggcatgaaccaccgtgcctggcccagaaaataaactttaaactatcgtttaagccaccaaatctgtggtattttgttatggcagtcctagcaaactaatacaccctcctcccacccataatcagagggcactatcaggcacctgggtcagccttgctcaccccttggacactgtagttcaacccatcaaccctatcatctataccaaacttgtccaacccacagcccacgggctgtatgtggcccaggacagctttgaatgcagcccaacacaaattcataaactttcttaaaacattatgagattttttttgcgatttttaataaactcatccgccatcattagtatattttatgtgtggcccaagacaattcttctaatgtggcccagggaagccaaaagagtggacacccctgatacaccttcaaaacagatccagatctgaccacctgttagcatctctaccacaccaccgtttgaccaccctgatctgagctacctgcctcaggtgccagtactctcaaagcaattgcatctttggtctccctgactccactctcatcttgacagtcttctcctgcagcggccagagaattcctatgaagagctaagtcacagcacagccctcctctgctcaaaggcctcccatagctcccacttctctcaaggtggaaatcaaagtctgtatgtgagccaagtgtggtggctcacgcctgtaatcccagcactttgacaggctgaggcaggaggattgcttgaggccaggagttcaaaagcagcctaggcaacacagtgagacattgtctctacaaaaaataaataaacaaagtcgtatgtggctcacaagcccttcaagatctgcccccacaggcctcccttttctgtccttgtcccctcccatctccttcccttaatccaccccagccagtcttcctcatccatgcctcctcctgacgtgggcatttgtgttccatctaccttgaacttactctccctgagttcttcgctctattcaggcctcagcttaaataccaacttctcagaaaaatgacttctttgtttaccatctgcctccccacacaataacatcacctccataaaggcaggccatgcttatcatcattgcagtatccaatctgcagtggtgctggctgcctgttgtgggtgctcagtatttatctgtggaaggaaaagaatatatgctcattccagctgctagcagtctgcagggcaaagtctgagaataataggggatgtgagcacaggctggggccaagaaacaccaccagcaccaccaagcaatcatacacaccctgcctcaaaaaggcctcacctgaacataggctgggccaccaacctctatgtatcgggccccaagccagagtctcctgctcaatgtctcttacacatacacacacacacagagaagatacattctcacacacagtccaggcatcgactgaatcacacaatcacactaccattcacagtcaccgtaacaacatcacacacagtctagggcctttatactgtgtcaggtccaccccattacctctaagtatctgtctcagacacaattacacctggtgcaggcaaacacagctgcatgattatcacatatgatgattaaatcacaggtcacacacacgcagagtaagcacacagaacaacccacaaacctggtcacagagtgactcatgcagacagacgcccagctcaaattcagtaaaaaatgatacacatttataaaaatgattacatgtgttcacagagagccacacatagctacactcaatacacaccctgacataggcaaccacaccgctcacctctcacaaaggcaccttcagtacttacacagacactcacacccacaagccctcagacaggcaccctctcccctcactcctaacatgggcaccctcacctctcacccaggtacccttgttactggtggagggtgtccaggttcttggcatcttgaacaaataattggacaaaatgcacaaagaaaagaatgaagcaacaaaagcagagatgtattgaaaatgaaagtacactccactgtatgggagcaggccggagcataggggctcaagagcccggttacagaattttctggggtttaaataccctctagaggtttccattggttacttggtatatgccctatgtaaatgaagaggacgaagtaaagttacaaagtgatttactccatgtacgccctgcataaatggagaggatatttcctaccatagctgcagtttccatttgatttacttctaggaagtccttaggttccctgcctccagacccgattttcttgcctcacccttacccctcacccctcacacaaacaccctcagccctcccaaagccaccctcagcctcacacagccgccctcaccctcagcctcacacaggcaccctcagctctcacacaggcaccctcagccctcacacagccgccctcaccctcagcctcacacaggcaccctcagcctcacacaggcaccctcagctctcacacaggcaccctcagccctcagccctcacacagccgccctcaccctcaccctcacacaggcaccctcagcctcacacaggcactctcaccctcagccttcacatttccctcacctccaagtcccgcctttcgcgcatcgcctgctgctctcccactcagcgccacctcagtcccacaaaggccgggctgggatcctgtggcctccgtgctgaccaacgtcaactacaattcccagcaggcaccgcgcctgggtacacttgagcttccggaggacgccgggaattgtagtcctggcgggcgtgggcccttgaggtgtgctgggagctgtggtccgggtcggcgggcgcgcaagttggctagtctctgcggccacctccggaagggtccgccggctgtgctggtgaggtgggtttcgggggtgttctccgtcctgatccaggctggagaggggcacagcaggtccagaagccgcgaacctctggggcggccagagcgagatgcggggtaccgcccagcgggtagagagtgagaggctgactaggggacgtgagtagacggactgcgagtgccggacacacgcgcagaggatgtgacggactgacggaccaggcgtggacggaccgtgtgtgcacggactgacggacccggtgtggacagactcacggaccgaatgtggtgcggaatgacacactgagtgccggacggaccgacggagaatgtgtcggactgacggagtgtgtgtcggatggactgattgaccgggtgtggggcggacgaagtgtggagcgggcggacagataacagataaaatgtaggaccagtggcctgggagggtgtggggcggacccgtttatgtgtctgataggcggttctgtgtctgacacctcttgggtgtgtgtatctgacgggttggagtgtgtgattctgataggttgagtgtaacactaaccatggagtgtgtgactgacagagatggttgccgtttgagacttcctacgtgggttgtgagatactgtgagagggtgagcgtgtgacggtgggatttcaagtgtgactgattttctttgtgtgtccttgagatggtgactaagattatgaatgactgtgatcagaataatactgtgtgatggaaatgctgcgagggcctgtgtttatttttgagacggagtcttgctctgttgcccaggctggagtgcagtggcgcaatctcggctcactgcaacctccatctcccgggttcaagcgattatcctgcgtcagcctcccgagtagctgggattacaggcaccggccaccacacttggctaatttttgtatttttggtagagacgggctttcaccatgttggttaggctggcccggaactcctgacctcaggtgatccacctgcctaggcctcccaaagtgctgggattataggcatgagccaccatgcctggccaggcctgtgtttatttgactgattataggtgacattgagatatttcctgtgtctgggtattttgaaggctgtggctgacagactgtacctgagataatatgtgttaatatctgattgactgagatttttatcagggagactaaaacttgggtgatccacaaacagtttaccaagcatatgagagaggatttgtgctttgccatgtctgcagctgaaactgagtgactagtggtcattcagctgggcttatggatatgtcccccagtgtttgcttacgtgtagcagggggctatggtatccatacatctactgcatgtttactgtgcaccaggcctgtgctggacacttataataaatcacctcacataatctcatagcaaccctctgaggtaggtaccattatcaggcttggtataatccatgtgtgagaaatgaaaagaaccaccctccttggttggtaaagcagctgtggatggggaacctcaacctgataggagttgaggttggctgaggaggctgaggaagtttcacatacatgtatttcagagaccgtcatgagggatttctccagaacaggtgttccaggggtgcaaaagagaacttggaagctgttgcagcatctattgtcatccctgccacccttgctcctccttcccctcatgattccctacattcttgggtaaccatgctcagcctttactggtcattccatttgcttaatgcctgcttattgtgaacctgctatagggcaagtcctgtgtgctgtggctccaggacagcccagcctctctgaggaaacagtacagaactagcaaagagttacccagggcactctgggaagaggacttagactagtaccaggtatctgggatgacacctgaggaaagtggcagctaagatgaggcctagagagcccagaggaatccgtcagagacggatttcagaactcgagagcagcaggggcgacaaggggcttagaaaggccacaagagacccaggagaactttacagtgcggcgaaggggcttaaacgcagcttggccagaggccaccagaggtcaccagcggtcaccaaaaggtttcaggattggggtcttgttttagagtaacgttctcttcttcctgtgcccaaggccattgctctttctcaggcctcctgcatctctgtccagggtgacttccttgagcagagactccaggcacactgagcgtcctggctgacattgaaggaaaggaaaaagaactccaaatacttaaaactgtgggagtcgtggatgggagagggagaggctaagtctttgagtaaggagtagtatgtggccaaagcaaagtgtcgaggtctcctaggagaggttacacttaatttagggtattcttcctgactataagagaaaacaaattcactgtgggaagtagagaatgtcaagaaaagtaatacagtagtcacccctcatcttcagttttggtgaatatagtacaataaaatattttgagagagagagaaagaccacattaatatagcttttattacagtgtattgttataattgttctattttattagtcattgttgttaatttcttactatgcctaacttatgaactttatcaagggtatataataagaaaaaaatatagaatatataaggttcagtaatatccatggtttcaggcatccactggagggtcttggaacacatcccctgcagataagggggaactaccatagtataaaataccttggtaaggatgtagagaaattggaaccctcatccacaactggtgggaatgcaaaatggtatagccaatttgcaaaacagcctggcagtttcttaaaaagttaagcattgcctacatgcggccaggcgcagtggctcatgcctgtaatcccagcaatttgggaggctgaggtgggcggaacatgaggtcaggagatcgagaccatcgtggctaatacggtgaaaccccgtctctactaaaagtacaaaaaaaaatagctgggtgtggtggtgggtgcctgtagtcccagctactcgggaggctgaggcaggagaatggcgtgaacccaggaggcagagcttgcagtgagccaagattgcgccactgcactccagcctgggcgacaaagcaagactccgtctggagaaaaaaagaattttttcaaaaagaaagtattatctccctctgaatgtcggtagcacccccatctagaaatggggctagattctgagaagtagaattaatattgaggcagagagcacagtcattttaaagctcttacaacatactgccaaattgtttgccaaagatattctaattgattgccctcaccaatagtacatgaaagtagttttttgctgtccctgaccagcattcagtgctcacagttctagaatttggaaaggctttgagtgtggaggaaagatcgcagatagcctgagctcaaacactagctttgttcctactgaccagatgactctagcagctgactttccccaacttggaaaatgggagtggtaatactgactcacagggtggagctaaggcttgaatgggataacagatgccaaaggctagtgtggcctggtagccggtaggttcccactgactgtctgttcccattttcttttattcctgttgcacactatacccatatccatcatcataattatcttatcatgtgttggtcgctgtccttccgttgaggccattgagcccagcacccatgccttccccgtatttgcattcctagtacagtgctgggcacagagtaggcacctaatggggctgtgctgaacaaaagtattattattgatgtatgtgcccagcaatgctgtagacactggggataaagcaaagacctaaacaaaaacccctgcccttaatgtgctgatactccaacagggacaagtaaataataaacaagtaaccacatacgtgtatcacacatcaggtggtaaagagcaaataaagcagtgtagaagcacagagacttactgataaggcgtcttttgtgtagaggcctgacttaaataagggagagaacacccaacaattatcaaatgcactttttttttttttttttttgagacagaatctcactctgtcggccaggctggagtgcagtggcacaatctctgctcactgcaacctccacctcccgggttcaagcaattctcctgtctcagcctcccaagtagctgggattacaggcccccgctgccacgcctgtctagttttcatatttttagtagagatggggtttcgccatgctggccaggctggtcttgaattcctgaccttgtgatccacctgcctcagcctcccaaagtgctgggattacaggtgtgagccaccgcgtccagctgacgttattattattattattattattattattattattattattattattttgagatggagtctctgttgccaggctggagtgcagtggcgtgatctcggctcactgcaatctccacctcccgggttcaagagattctcctgcctcagcctcctaagtagctgggactacaggcacacgccaccacgcccagctaatttttttgtatttttaatagagacggggtttaatcatgttggccaggatggtctcgatctcttgaccttgtgatcggcccagcttggcctcccaaagtgttgggattacaggcatgagccaccgtgcctggccaacattatttttttaaaagctgtatttttattttattttattttttgagatggagtttcactcttgttgcccaggctggagtgcaatggcagaatctcggcttactgcagcctccaccttccaggttaaagggtttcttctgcctcagcctcccaagtagctgggattacaggcatgcaccaccacgcccggctgattttgtatttttagtatagatggggtttctccatattggtcaggctggtcttgaactcctgacctcgtgatctactcgcctcggtctcccagagtgctgggattacaggcgtgagccaccgcgcctggcctccagaacatttttatcatccccaaaagaaattcccaaacctattagcaaccactctcatttttgtctctcttcagcctctgacaaacactaatatgctttttttttttttttttttttttgagatggagtctacctctgtcgccaaggctgtagtgcagtggtgtactctcggctcactgcaacctctgcctcccaagttcaagagattctcctgcctcagcctcctgagtagttgggattacaggtgcctgccaccacacccagctaatttttgtattttttagtagagacggggtttcactgtgttggccaggctggtcttgaactcctgacctcaggtgatctacccacctcggcctcccaaagtgctgggatcacaggtgtgagccaccgtgccctgccgtgtctttcttcttttacttagcatcatgttttcaaggttcatccatgttgtagcattaatcagtacttcatttctgtttatggtgaatagtgttccattataggtatatacagcattttatccattcatcaggtggacatttggattgtttctccttttttgctgttatgagtaatgctgttatgcacatttatgtataaagttttgtgaggacatatactcatttctcttgggtctatacgtaggagtagaattgctaggtcatggggtaactctgtttaagcttttgaggaactcccagactgtacttcccacagtggctatcccatcttacattcccagcagcagcatatgaggattacagtttctccatatccttgcctacacatgttatctgattataggcatcccagcaggtgtgaagtgctatctcattgtggttttcatttgcagttccctggtagctagtgatgttaagcatcttttcatgtatttattgcccatttgtgtatcttccttggagaaatgtctagtcacattctttgctcattttaaaattgtattattcatctttttactatggagttgttctagatacaggtcccttatcaaatatatgatttgcaaatattttctcccactctgtgggctgcttttttactttcttgatgtggtccttcaaatcacaaaagcttttaattttgataaagtccagtttatttattttttcttttgttacttatgcttttggtgtcatagctaagacagctttgcattattttcaagtattcatggaacattaaccaaaattaaccatacactgggtcacaaaccaagtttcagcaaattttaaatgatcgaaatccattgtagcatgttttctgaccacaacagacttaatctagacatcagtaataaaaagacaactagaaaacccccagttgtttggcaatgaagcaggagagttttaaataaataaccaatgggactgggcatggtgactcatgcttgtaatcccagcactctgtggggccgaggcaggcagatcgcttgaggtcaggagttcgagaccagccccgccaacatggcaaaaccccgtctccactaaaaatacaaaaattagcctcacatggtggtgcacacctgtagttccagctacttgggaggctgaggcaggaggattgcttgaacccgggaggcggagttgcagtgagccgagatagcgtcactgccctccagcctgggcgacagagggagactccgtctcaaaaaaataaaataaattttaaaaaataattaatgagtaaggtagaaattgtaacagaaattagaaaatatttttaactaaatgataatgaagatacaacatatcaaacttgtgatgtatagctaaagctgtgtttagagagaaatttatagccttaaatatgtgcattagaaaagaggaaaggcgaaagtcaattatgtatcaatctcaaacactacaaaataattagcaagtaaagtgagagaatgaccatgtggctacctggggaacagagggagaaagacttggctctgttggggaggagcacgccttaaacaggctggctgtaggtttgcgtgggtttgtagcttagctctctgttaacccttcactagctgagggactttgggcaaatattttcctcctgagtgtctgtttttccatccataaaataggtagaaagtcccacctcctgagtttgttgtaagttttttgtttgtttgtttttgttttgagacagagtcttgttctgttgcgcaggctggagtgcagtggcgtagtctcggctcactgcaagctccgcctcccgggttcacgccattctcctgcctcagcctcctgagtagctgggaccacaggtgcccgccaccacgtctggctaatttgttttgtatttttagtagagacggggtttcaccatgttagccaggatggtgtttgttgtaagttttaaatgagtctacatgcaagcagtagtagcttagaacagtgctcagcaccaagtgggtgctgtcctaattatgaggattgtctatgtctttgtgagagtctttcacatctcacgggccacaagcctgtgttttccctgctctgtaggcatgaggcagggcccaggttccatgtgatgctgaagctctgacattcctgcaggcccagttccaaggctccggcatcctgtgtctcactgagcactgctgcccgatggccatccccaagcactccctgagcccagtgccgtgggaagaggacagcttccttcaagtgaaggtggaggaggaagaggaagccagcctctcccagggcggagaatccagccatgaccacattgctcactctgaggctgcacgcctgcgcttccggcacttccgctatgaggaggcatctggtccacacgaggccctggcccacctccgagcgctgtgctgtcagtggctgcagcccgaggcgcactccaaggagcagatactggagctgctggtgctggagcagttcctgggtgcgctgcccccagagatccaagcctgggtgggagcccagagtcccaagagcggagaggaagccgctgtgctggtggaggatctgactcaggtgctggacaagagaggtaaaggggcgccgtgggcagcttcacggcacaccagagatacaccctggacaggaacatgggagcacagggctctggtttggggttgctcatgcacccattctcacatttgtactttaccgtaactctcacacactgttgtagacaggtgtgttttggttgcaggtgaccaaaagcgagctgaaatgggctgaagcaaagaagggtaaggaggcagcagatacggctatatccagaagatctgttgacagcatcagaactctcttcttcctctcttgttctgtttctcagttggttttttctgtgttagcttcattcttattttaggttctctttccaaaggggttaaagatagccaggaaccccaggcttatgtcttaccaatgtagaaaccccggggtaataacaataagaggtccctggtctgagcccccactggcctggttgggatcttatgtttgtgtttggccaaccaaatcccagggactaacagtgagcaactggctgtttctcagaggaaaccagacgagggcctgggtgcctggggtggctgttgggggtgacggaaataccagatgtccctgtgtaccttctctatgcccaccctgggctggcctccaggatttgggtgggtcagacctgccccaggctcagctgggcactgttactcacagagacccacacaaacatcccaacccagggaggtccagtgggatgcagggaagacccagccttgggacaatccagagcagggagtggtggctcgtctcagatgggcttggcctggcctattggcaacagataggaggtgggcataccacacactgggaggaaacgtgcagtgtgcaggaggaatgtggagtctggatacagctgcatcatcaaggctcagtagatccaaccgctgctgctcttcctggccatgtgactcccttgtgcctcagtttactcatgggtaaaatggggattgtaataaaaacgcccaccttagtggtgttgcgagatacaaggcaatacccgtgcagcacctgaaatggtgcctggcacagattaaataaatggtaactgcaactgttaggataatttgttcagctctgggagaaacaggcctctctggaacagaggttggtctatgcccaagcagatgtcacagagacagggagaggaaggagggagtggccccatcctcccacagggttggccaaagctcagagaaagggtaaaatgcagagggaatggtggggtcaaaggcctggcagtgtgatttgcactggtgtattctggtaaaagcaggtggtgtgatgtttctggatagaggaaggaagggggagacagggccaagcagatggctgggggagcaggggagactgcctgtggacctggaggagaacattctggagctgaaatcccaactgggccactagctaactgtgatcctgtaccagttactcaacaccttccctcagctggatttcagtttccccatctgcaacagaatcacagcagtacctccttctgagagcaggtcgaagctgaaatgaggcgatggaagtcacccactgtgcttggggcccagcacgacaagagcctgatagtggttagtggccctggaaggccagcggcacagcatccatggcttacagatggggagactgagtcccagatgagggcaggactgattaaggtggtagacctggggtttgagtccagtttctgcactgctgagccccactgtggacttgagcagtgggtattccacctgtctctgcctcctccctggaatccatccagtagatgtgccagattatgtgtcctttgcacccatgcagggcaggtcagtgcgagcattcctctacctcatgcacactctgatctccaagagcacctccgccacactctgccttcatagtactttacaatgtaggggcttgagaggccagatgggtacctcatgtactcacccccagcagccatattctacctggggttctacttgcagaaattttcaccatcgtgggcttctggatggattccctcattcagccagaattcactgagcacctgtggacacatccaggcctagaggcaaggtgttgagtgtgagggacagaaccgcaacctcacagagatcagagcctgcaggggacacatccaggcctagacgcaaggcgttgagtgtgagggacagaactccaaccccacagagatcagagcctgcaggggacacatccaggcctagacgcaaggtgtcgagtgtgagggacagaactccaaccccacagagatcagagcctgcaggggacacatccaggcctagacgcaaggtgtcgagtgtgagggacagaactccaaccccacagagatcagagcctgcaggggacacatccaggcctagacgcaaggtgtcgagtgtgagggacagaactccaaccccacagagatcagagcctgcaggggacacatccaggcctagacgcaaggtgtcgagtgtgagggacagaactccaaccccacagagatcagagcctgcaggggacacatccaggcctagacgcaaggtgtcgagtgtgagggacagaactccaaccccacagagatcagagcctgcaggggacacatccaggcctagacgcaaggtgttgagtgtgagggacagaactgcaaccccacagagatcagagcctgcaggggtgcatgtgctcagggtcctgacaaggacagaccctccctctctctctgtctccagatcagttccacatcagggtttctcctcttgactcttgagccaaaattgggagccttgaaagatggcgagtttggtgggaggaggagaaatcagaacccatggtgtagttttggatggtgtgggaggacagccctgcaccctttgtcatccaagacaccaaatgagaaacttccccttggaactggggccagatgttaggaacgggccacatctccccttacaaagtgtgaccggggccctcggcagagtaggggaggcttggtgtggtaggaggagtgacagtgtggttcggactgtttcaggatgggatccaggagccgagcccacagaggcaagctgcaagcagagtgacctgggagagtcagagccatcaaatgtcactgagaccctcatgggaggtgtttcccttggacccgcctttgtcaaggcatgtgaacctgagggcagctcagagaggtctggactatcaggggagatctggacaaagtctgtcacccaacagatccacttcaagaaaacttcagggccttacaaggatgtccccacagaccagcgtggccgtgaatctggtgcctcgaggaacagttctagtgcgtggccaaacctcacctcccaagagaagcctccttcagaagacaaatttgatctggtggatgcttatgggacagagcctccatacacctactcagggaagaggtcctccaagtgtcgcgagtgtaggaagatgttccagagtgcttcggcgctcgaggcacaccagaagacccattctcggaagaccccatatgcctgcagcgagtgtgggaaagccttcagccggagcactcacctcgcccagcaccaggttgtccacacaggggcgaagccccatgagtgtaaggaatgtgggaaggccttcagccgagtcacccacctgactcagcaccaaaggattcatactggagagaaaccctacaaatgtggggaatgtggtaaaaccttcagccgcagcactcacctcacccagcaccagcgggtgcacacgggggagcggccctacgagtgtgacgcgtgtgggaaagccttcagccagagcacgcacctgactcaacaccagcgcatccacaccggggagaagccctacaagtgtgacgcgtgtggccgagccttcagcgactgctcagccctgatccgacatctgagaatccactctggagagaagccatatcagtgtaaggtttgtccgaaggcctttgcacagagctcctccctcattgagcaccagaggatccacacgggagagaagccttataagtgcagcgactgtgggaaggccttcagtcgtagctcagccctgatggttcacttgcggatccacatcacggtgctgcaatgaccggaagtcgcccctgggggcgtagcacagcgtcttctcggaggctcgaggtctaagagaaacgctgagttcctgaagagccacagacagggtgggtgattgatgagttgtcaaaatgataggtgcctgagggcagactcgggctgtctaggaaccactctgcatttgaggaaccctgatgagcacaaggtgattcaggccagctggagaagcttccagaagggccctgcactgctaccctctatttcccactcagggctgtcccagagagaaggcagccgaactgaggatttagactggttctgagggccagggcaaatgaaggcgcatgtctctcagaactcagcgtcccaagacgctctgggcgggccaactgtagcttgttctcatgtggttcttcttgcctgcttttctgctgcttagcccagaacggacacctgccatgcccacctctgtgccttggcacctactatttccactccagactattttgtgcctaactgcaaggctgacttttgagactgcctcttccacgatgccttttctacactctgcctctctcatggtttcctgtcgtaatcagtggtgctgcttgacacctgcccagcatgttcctgtctctccttttccttccacatcccaccagtcaccagcgctattgttttaacctaaagcttatctgtaattcacctccttttccaccactgctaccttatgtgagccctcattgcctcttgcctggattatagccggggtctccttcctgaccacttcctgcctttattctctgcccctgtatcactctccaggggactcttgatattacttagatctgactgtgtcactccaaggtggaaagctctccaacccatcttctacagcacagcttcctgaacagggtataagtatgctgagatgcaggctgctctgggccccgagcaacctctccagttatcctcatatgcatgtatgaatactgtcatttttctgtgcgtgcagtgaaaatggcctcatctcataccatggctccaccttccatacaccagccacacggaactactgtggtccctgaaggagccatacattttcccacttatgtgcctttgtacctgtgcctggaaccctcctcttctttttctttttcttttcttttctttttttttttttgagatggagtctcgctctgtcgcccaggctggagtgcagtggcgcgatctcggctcactgcaagctctgcctcccgggttcatgccattctcctgcctcagcctcccaagtagctgggactacaggcgcctgccaccacgcccagctagtttttttttttttttgtatttttagtagagatggagtttcaccatgttagccaggatggtctcgatctcctgacctcgtgatccacccgcctcggcctcccaaagtgctgggattacaggcgtgagccaccgcacctggccctcctttttcatctaaggtgtttcaaatgttgcccaaagaaacctccctgctctccgggagcagacttcagcttgccctctctgcttccagagcacctcctagatacctctcttacaactcctgccaccttgttttacttatttgctccttgtagagctgccttttccaaggataccataaactcctgagagcaggggccatgtcttactctcagtatctacaacacacaagactcagtaggccctgactgatgtctcttacatgaatgtgactggtgcccccaggaggcagtcaccgtgctgtctctgccccacattgtccttatgtatgtttacatggatgtctccccagcagcttgaaccctggagagcaagaataatctgattttcctgggggccagcacccaaataagcctggcatgcagtggcctcaataaaatgtgactgtattgagtcattttctagggccccagatcccctggtgtcatggacttagtctttgccagcattctgtccatgtgttctctggtcttctctcacaatgctgcatccctgtcccatttttagggtccctgtctatcactggatgctgcagcttctgttcattactgttagtgtatcattcttcatgcctctgtttctgtgatggtctcatcatatgtgaaccatttgacctggcgtattgtgtactagtcaccgtcaccatctctccatatgtatctccctgtatttcgggcccattccctctatgtcaagagtaaatagaggcacagagactgatgagaaacgttcataacatgaaggtaagactcagggagacagagactttgtggaagtatctctgagggagtcccagacacaggcagagagggccacatatcgtgtgccagaggctgagagactgagagggatgacaggcttaggggaaaactcagagaggagagatgcacattcctagtgaaattgcacaggcttccagcatgctggagggaacagaaaaggcatgggcctgaattcaggctgcagagcctgactcctccctgtggctacttttgggacctaagataagtgactttcctgaacctccatgacctcctcatatgtaaaccagggacaggacccaccttgtgtagtgcctgacccaaagcctggccctgcacactgtctctgactcacagcaatcatcagcacctctctttgcctcctacttgctcagtctctgtcacaagaactggatctccatccccttgatgctctgagcatcttcacccatttggtcgttgagacatatctgtccatgtctgtctaaaaggggaggagatgagggagaaaaaagggaatctactcagagcctgtgtgtgctgcccagtctaccaaataatttatatacatctcagtcctcacacaaccatccctgttttatagaggaggaagtggcttagagaatgtaactgaccaaagtcacactgccaggaactggaagcactaggatttgacagcatatccaaatatgtcagcaatttcaataaacatgactgtactcaacaaaccaagtgtaaagacaaattctaacagactgaatttctttttggaccagccatatgttctttagaaaagatacacctaaaacaaggatatgggaagttgagggcaaagggatagaaaaggatatacaaggtaggcatgaaactgaagaaagctgatggagctgcattagtcgcgcaaaacagacattaaggtataaaagcattttaagaatcatggggtcactatgtttttataaaagaaacaatctattaggaagatgtaatagttcaaaaccaggcacataatatgagtcttgtagaacagaatcacagtgagaaactgacgaaaccttaagtgtacttggaagtgctaacacgttctttatgatagaaaacatttgaagaggccgggtgcggtggctcccacctgtaatcccagcactttgggaggccaagacaggcggatcacgaggtcaggagtgcgaggcaagcctgggcaacatagtgaaactgtctacaaaaaatacgaaaattagccagcctgggccgggcacagtggatcacacgtaattccagcactttgggaggccaagacaggcaggtcacgaggtcaggagattgagatcatcctggctaatatggtgtgtaaccccttctctactaaaaatacaaaaaattggccaggcacggtggctcacgcctgtaatcccagcactttgggaggccaaggcaggcggatcacgaggtcaggagttcgagaccagcctgaccagcgtggtgacaccccgtctctactaaaaatacaaaaaattagctggatgtggtggtgtgtacctgtaatcccagctactaaggaggctgaggcaggagaatcgcttgaacccaggaggcggaggttgcggtgagccaagatcacaccattgcgctccagcctgggcaacagagcgagactctgtctcaaaaaaaaaaaaaaaaaaaagccaggcatggcggcacacgcctgtagatccagctaatcaggaggctgaggcaggagaattgcttgaacctgggaggcagaggttgcagtgagccgagattgggtgacttcactccagcctcgacaacagagtgagactctgtctcaaaaaaaaaaaaaaaaaggctgggcacagtggctcacacctgtaatcccagcactttgggacgccgaggtgggtggatcacctgagttcacgagtttgcgaccagcctggccaacatggtgaaaccccgtgtctacaaaaaattagccgggcgtggtggcgggtgcctgtaatcccagctactcaggaggctgaggcaggagaattacttgaacctaggaggcagaggttgcagtgagccgagattgcaccattgcactccagtctgggcaataagagcaaaactccatttcaaaaacaaacaaaaaaaagactcaacccagaattctttttttttttttttttgagatggagtctcgctctgttgcccaggctggagtgcagtggtgtgatctcagctcactgcaagctccgcctcccgtcaacccagaattctatatccagtgcaaacacacttaaagaacgaaggcaaaatacagacatcctcaaatgaaacaaacctaagatatatatttcttgccagcagacttgcctgaaaagaaatgccaaaggaaactcttggtagaagggaaatgataccagagggaaagcgggaactttgggaattaaatgatagtaatagagattgcacaattattttatctttaaaatatggctggaggcggctgggcgcggtggctcacgtctgtaatcccagcactttgggaggctgaggtgggcggatcccaagggcaggagatggagaccatcctggctaacatgttgaaaccccatctctactaaaaatacaaaaaaattagctgggcgtggtggtgggctcctgtaatcccagctacttgggagactgaggcaggagaatggcatgaacctgggaggcagagcttgcagtgagccgagatcacgccactgcactccagcctgggcgacagagcaagactctgtctcaaaaaaaaaaaaaaaaaaagaaaaaaaatgtggctggaggccaggtgcagtgtaatcctagcactttgggaggctgaggtggacagaccacttgagctcaggagtttgagaccaacatggcgaaatactgtctctactaaagatacaaaaaatgaccgggtgcggtggctcacgccagtactttgggaggctgaggcggttgggatcacaaggtcaggagtttgagaccagcctggacagcatggtgaaaccccatctctactaaaaatacaaaaaactagccgggcatgctggtgggtgcctgtagtaccagctactccggaggctgaggcaggagaattgcttgaacctggcaggcggaggttgcagtgagccgagatcacaccactgcactccagcctgggcaacagagtgagattcgggaaaaaaaaaaaaaaagcaaaagcaaacaaacaaaactcaatagtaagaaaacaaacaggccaggcacggtggctcatgcctgtagtcccaacactttggaaggctgaggcaggtggatcacttgaggtcaggagttgaagaccagtgtggccaacatggtgaaaccccctctccactaaatatacaaaaatcagccagtgtggtggcacatgcctgtaatcccagctacacaggaggctgagggagttgaatcgcttgaacctgggcggcggaagttgcagtgagctgaaatcatgccactgcaccccagcctgggcaacagagcatgactctctcaaaaagaaagaaaagagaagaaaaaagaaaagagaagaaaaaagaaaacaacccaatattttaaagtgtgcaaaatatataaacagacatttcatcaaagatgctatatagatggcaactaagcacttggggaaaaaatgcttaacatcatcagacattaaggaaacgcaaggaaaaccactattagatatgtctacatacctattagaatggctaaaataaactttttaaaaaactaagctggggctgggcgtggtggctcacccctgtaatcccagcactttgggaggctgaggcgggtggatcacttgagctcaggagttggagaccagcctggccacccaacaaggtgaaaccccatctctactaaaaacataaaaattagctgggtgtggtggtgggtgcctgtcagcccagctactcaggaggctgaggcacgagaatcacttgaacccaggaggtagaggttgctgtgagccaagatcacgccattgcactccagcctgggcaacaagagcaaaattctgtctcaaaaacaaataaacaagaaaaggttttaaaaattgataaaccactagcaagaaagagagagaggacacatcaggcttgagagaagtgacatcatcatagactgtgcagacattaaaaggcataggcatattaggaactagatattactaaggcagtaaaccagatcactagcaaattcgttgaaaaacacaattcatcaactattggttgataatactgatacgcatcttctgtgtgccagggccttgaggccctgctccaggcagaaactcggcagtggttgggaaggcatcagatgtcagatggcacaagaggactcagagctgagggataatgggaaagaacacagaggaatccagccatttccacagcgtccagctctgctgtgggaggctgggaacagcccagcactaccaccctggactgggaggacaagaccacaaaatgcagcttccctgaacctcctcttggtgatggggttgatgtggtcgaggtagaggtgagtatgtctggagcctcaagcaactgcccatacctgctgggaccaggccgaggtgcccagggagtaagaggcagcatcctggaagagcacagatgaaagaggccctgagaagtgttggttggccaggtgctgtggctcacacctgtaatcccaacactttgggaggctgaggcgggaggatcacttgagcccaagagttcaagaccagcctgggcaacatagtgagactcatctctacaaaaaataaataatagaaagaaaaatgtgagttggccaggcatggtggctcatgcctgtagtcccagctactcaggaggctgaggtgggaggatcacttaaggccaggagttcaagacaagcttgggcaacacagtgagaccctgtctacaaaaaataataattagccagacgtggcgatgcatgcccaggctcccagctacttgggaggctgaggcaggaggatcgcttgagcctgggaggtcaaaactgcagtgagccggactgcaacactgcactccagcctgggtgacagtgtgagaccctgtctcaaaaaagaaaaaagaaaagaaaactgtgctcttaagagccagttctccactcctctacctcaggagccaccccagaacccatccactttgaggacacgagatcccagcccactcagccctgggagtccaaagacattttaaacagagcctctcttcacatttattaattcctgggaggaatgagggaggcttctccagccccccagagaccccggccttgtgctgcaacaggaggggagggagccagtccagaatccccggcacttctgaggacaccaacagcaccctgggcccgcggctgcatcagctttctagacaacgggagaaaagagaaatggtggaggaggggaaatcctatgccctcctcctcgcggaaatcaaggccgacctccctgacgcccccccggaaggaagcgcgtggtcggctgccagccgagacccccatctgcgcctccagctgcagggcctttgctgggcggttcctcgcccgcaattcccccacgagccctggggagacccagcgctaaccaggggtgcccaagggaggagccgggagaggccctcctggaggtgggcacagcccaggcaaacatcagcagacggaaccagcacccgggacccagggaaacgtcacctgccaccaggagctccacagggtcgctgagctccgattcgaaggtgtggggcacccaggagcggtagcggcacctgtagttgccggcgtgctggggccccacgaagatcagctcgaggttcgccgcggccccgggggtgcggaccgtcttcacggccttcgtctcgccctcgcgcagcagctcgaaggtgacgtcggggatgggtccctcgcagcgcaggacggcatctcggcccgccaggaccgccccactccacgtcgcccggagctgaggcctgggagggggtcctgggcggagcgggcgggtggtcgggccaggccacgccccaggccacgccccaggccacaccccaggccacaccccaggccgcgcccgcgcctgcgcctcagccccggcttcatcttccctgtcttgttcctgggcgcagagggctcctccggcgccgccgagctgcgcccgctgccttcacaccccggacatccgcgccacacgtgagtgtccccgcacccctcccccaggaccgtggaagtcccagattcgggcctgctctggggcttctggggtccccagcctcggtcactctgacgggtgaagggaagaagaaatgatggagaaaacggtgctccttcatggagggaccaaaaaaggacatacaatctatgtcaatagatgagggttttccctccataagtttaactttaaaagtgtatttaaggtgccgggcgcagtggctcacacctgtaatctcagcactttgagaggccgaggcaggcggattgcctgagctcaggagttccagaccagcctgggtaacacggtgaaaccccgtctctactaaaatacaaaaaattagccgggcgtggcagcgtgcgcctgtaatcccagctactcgggaggtggaggcaggaaaattgcttgaacctgggaggcagaggtttcagtgagccaagattgcgccactgcactccagcccgggtgacagagtgacactccgtctcaaaaacaaacaaacaaaacaaaactgtaaggaatcaaatgttacaaaatcctggaagattttggtaatgctgttgataatttcagggaaattaatgaagtacatgtaagtgcttgatttaaatgtgtattttattcaatagtttgagtatcttgccatggaagatactagcccagcctagcagaaaagtgcaatatgtataatatactttcgcattttaaaagttatattccctatccattttgaaatgctagccaaactacatgaagttatttgcaattaattgtaagctaatcaggaattttgaaagcttgattggattaacaaactataatgttgaaatttggtaaaatcataatgttaatttttactgtgaaacgttttcttgtaagatagatatacacatcctagtttaattttgtgtcttagtgtggatttacaaatttactacagttattctgagcccaggaacccaatcagatttcaggccagtttgatactggctgttcttaattctaacaggagagtaggacatcatactaaatgttatgtcagtgggactgtgttgtctttggagcttagtaaattaatcattttcttcagactttaaggagagtgataaataaaatttggagtcataggatatagatgtacaatttaaagattaaacattttttttttttttgagatggagttttgctcttgttgcccaggctggaatgcagtggcatgacctggactcactgcaaactccacctcccgggttaaagcaattctcctgcctcagcctcccaagtggctgggattacaggcatgtgccaccacagctggctaattttgtatttttagtagagacagggtttctccatgttggccaggctgctcttgaactcctgattttgtgatccacccgccttggcctcccaaagtgctgtgattacaggcgtgagccaccttgcctggccaagattaaacatttttcatcaattgtggatggtggcttataacactgcaagaataggctgggcatggtgactcacaagtgtaatcccagcactttgggaggcagaggcgggcagatcacaaggtcaggaggtcaagaccagcccagccaacatagcaaaacccggtctctactaaaaatacgaaaattaggtgggcatggtggcatgcgcctctaataccagctactcaggaggctgaggcaggagaactgcctgaacccagaaggcgaaagttgcagtgagctgagactgcaccactgcactccggcctgcaagaataaaagtaagttatccaaaaaaaaaacaaaaaggagaagaaaagggaggaatgaaggagagagatggggttggggggcagagatgagagagagagaaagaagaaaaaagaagaaagaaaagagagaaagaaggaaggaagaaagaaagaaggaaagagaaagaaagaaagaggaaggaaggcaggaaagaaaagaaagaaagtgaaagaaaagagaaaacggtgctcccagcaaagggtacgacctcaagatctggaggtcagacctgtgccctcacgctctgctgggctctgagtcctggagacgtcgatgaggaaatcagagggacaaacagagctggggacggcggggatggggagaaggacacatcagccgtgcgcctgcgggaccggggccggggcggggggtccagtatgacgactgacatggccagtaataaaacaaggcagccacagagctgcagggatctgaacaagaaaacctggggccagcctccctgctgccgaccaccacgctacacgtgacctacgggcttgcgtccgtgggaaataagccgaaattccaggcgtccccagaccctcgaccaccgatcgcctgctccccgccggggtaggcgatgggggctgaaccaaggcccagagcgccgccgtcggacgcccaaggaaagaggggaaagacaggaggccccgaggggcactgaacccgcgcccgccctcgctggtgccccgccagctcaccgtccacgtgcagctccaagcgctcgctgggcgcggagcccccgaaaggcggcttcaggtccacgtagacgcagctgtagttggcggagtcagccacggaaatgttgtgcagctcgaagagcgcctcggtcccagcggggctctggaaacggtgcacgcggcgcccgcccctgtcctcgcgcaccagggcgaagcgcgcgccctccaggggcgccaggcaccgcagccgcaaggccctgccggactccggctccggggagaactccggcgcgggcagcgtctctgcggagcagcacacgggctgacccgggcgcccagcggctggctcggccctaacgcgtggtctggcctcgcgctctttgccttggctgagtcttctgcccgcaatgacctggccagcttcctccctcgcctcctccgggcccgccccacctttgcatcccagtccttggatatctcacacgcaccctttcactgtttcttagtaatttgtttgtctacagacacagacgggaagcggggacggggacatgttttgtgcatggcttgatgcctggtgcacgatgccgctcagtagtggatttgctccacgagcgtcttctgagcaccgccccaatgcccgccccacggaggggcccctgtggtccgctgggcatggggttcgctgtccggtgctcagagtttgctaaataccatcaggtccaaggcaagcgagcggaggagctgcctcagcagaggccctcagtgctcacctagacctggcagctgggatgggacctgccaggtggtgccccctgtggcctgggccagacctgttcacccagttattccctgtggggcctgaaggttgtcacgctcatcatcatatttgcagtttaggaccctgaatcggcgggtgggcggataaagttggtattggaccctggcccagagcactgcacttccccagactctacacctggtactgctcctgctccccagggacccagccgcgtccctgtccctgctggccccggctcaccatcgctcagaatcagctcgaccggcgcgctgtccccggaccagccgttttggttgtcatgcagccggtagcggcaggtgtagtgacctccatcccccagggccaccgcgttcaggtgaaagaagatgcgatctgggctggtgctgctcctgggtaccagcagctctttctccccgcgccgtagctggaagtccactccactcaggggagccacgcaggtgagggtcaccttgttgccagggtgcaggacctgggaggactctccatggtgcatcagcacaggcggtggtggtgcagctgcaatgcaggcagcattactaggctgccccatccctggagctgccctctgcccagtccccagacctctgccctccgggtggcaatcccaggaacacccttccattcttttttttttttttttttgaaacggagtttcgctcttgttgcccaggctggagtgcagtggcgccactcagctcactgcaagctctgcctcccaggttcaagggattctcctgcctcagcctcctgagtagctggtactacaggcacctgccaccacacctggctaatttttgtatttttagtagagacggggtttcgtcatgttgggtagactggtctcgatctcttgacctcatgatccgctggcctcagcctcccaaagtgctgggattataggcgtgagccaccgcacccggcctcacccttccattctttgggcatcctctgcccaaactcctttgcaaccatcagacccaggcaaccgtgtggccagcttcctggacctggtcctgggcaaggacattcagcatggaggtcaggatgaatgtggtcatgccccctgtatcctcctcccccagcagcccccagagatggttcccacagtcaccgagctcctcaatggtcacagtagcgctgggctcagagagggcgccttccccatcggtccggtagctgcagctgtagttgccaggctgatggactggaaaggtggcctccacatcctcctgggcctcaggcacctccagaaactcatggtcgccctcccgcctcagcagaaaagtcacaccccgcagcacacctcggcacactgctgttgttttcaggccgggggtgatccaggacactggcgccatcgagagccagggagcaggcaaggactctgtgggtggggtggagttgaagagtgcttctgcataacaggagacgtgggaagcccagcagaacctgggccccacactcataagactgtgaaggagacagggatggagggcattgctgggaaaaggcaggcaggcaccagtggaaacaaggcatacggcaagagaaaaagagtgtgtgggagctgtacggcatgccgggcctgctggggacacaaccatgtattccttacaacacagacatcatccccatttgacagatgggaagattggggcttggggctcagagacatcgggtgacttggaggaagggagaccccccagtcaacaacctacccactgcctcctggcccccaattcatgccccggctcacttggccctgtcagctccaggagcttgctcagctgggtccatcctgtggacaagcccgagcggcagcggtagcggccctgggtgtcacccgtcagcaggaactggtgcttgatggcaggtgagtcaaggtgcacaggctcctgggccaccccattcttgaacagctggaagtctggagtctccaggtgggcctggcacgtcagcgtcacattggccaagggtttcagcagtgattcggactctgcccacaggctgggctgcgtctcataaactgcaaggggtggctgggatcagctcagtgccacagagacagggctcccccccggcctgggcccaccattcccagacctcacccctgcactcacatatggctgcttctgtcactgggccccaggtgacacctgcggagacagcccccgtaaggctcctgttcccgccccctcccgccccagggacccagaccccaggaggcctcaccccacagcaagagaaagaccacgagcatggacatgatggtcgcgctcactccggtgcagtgagtgtctggggtgagcgtctgcagcaatgaggccccaagggagggcggtggggtggctcgggcactgacctcttcccgtgtttgtccttcccggaaggcgggggcagggcccccatggggtcagggcaaagggtgaacttctgaggcctcaggatgcccagcaacaattataatcaataatcatgtatgattaataaactaaatcaagagtgataaaatgatgttaaaaccacctcatcctcatttcagtgatggatcctagaacctgttctagaaggagacgctgagttctccccactctacctggagctgctgaggtcaagtggagagtgccggggctgaagcccagcgagcccctccctgtcacaccacactgcacatgtgacaccaaaggtggggttcacctcttttcagactttctgcggttgccctcacatgggctgtctggaggtgcaccctcactcttcctgaggactgtggttccttctccatcactggttcattctgcatggtgtgacccaccacggctctggagtcggatttccacccaggtcattcagctgagacctgcgcttcccaggcctacccgtgacatgtgctcagttacctgagctgctggtggtcactcatgtggctatagcctgctgcctggaggccaggcctcccgcttcccctgcctccccctctcctcaccacagcctgttgggatggaacaggacaggggtgagaccgtggtgctttcacactcagcctccatggacatcctgtcattcccacccggggaggtctggtccccaccctgggtgtcccagcctagctccgctacgagtgtgagggcccagggcaaccgcctagccctcatctgccccctgcactgcatcctccccactcattcattccacaggcatttattgagcatctactgtgtgccagatgcaaagaagacagtgggataactgggcaaggagcattccaggcagagggaacagccagtgcaaacatgggagatgcgggtgcagtgagaaggagcagaggagaccaggagttgaggcgactgcagagcgattgcagagctcatagacgtgatgaagaccagctgggcactgcagcggctctggcttctgctgtgagggacggggagctgtggagactccctctgtttggtcccatttccatattgctgagcacctgctgcatgctctctgtcctgctcagagccagtacctggatggaggctgtgtgttctgggtggactgggggagaatgcattctttgcagaagagacaaccaggtgctgaggcctgaagtcataaccagacctggggcactcagacaaggactggtggccaggccagaggagcagagctcagggtgtgcacagaactcagaagtcagaccactgaacagtgacagaacctttcagcccattggcaatgaggctgcccaggcagccagaggcctggtcaaatctgaggtctgcagagatggagctgtcattctgtgtttcctttggcagtcccaacaccagcctcgttgcaccctcctcttagcttccctgggttctccagccctaagggtggtagcagcttcctgcaagtatccagctctgagattctgcaacatccacttttgctctctgagccttgcaaaacctgcacaatcagtccctaacttatatcccctctgtttgaaatacctagtgtggtttctatttcctgacttgactctgactggtgtggtacttggtataaagaaggttccctggccaggtgcggtggctcacgcctataatcccaacgctttgggaggctgaggcaggaggatcacttgagcccaggagttttgagacccgcctaggcaacatggtgagacactgtccttacaaaaaattttaaaattagccaggtgtagtgacgcaagtctgtcatcccagctgcttgggaggctgaggtgggaggatcacctgagcctaagaagtcgcggctgcaataaacagtgattgcaccactgcactccagcctgggtgacagagtgaaaccctgccccctcccccaaaaaagaaaagtcccatgaaacagacctacacaggtgagattctgagattgatctggttctgacctcggtcaggaatgcagtgctgagcttcttgccaacagaatatgagacactagaaagccatagcatgcggtttcatcatgtttaactgtcacctgtggttgcctgagatgaagtgctgactgaagcgagcaccttaggagacacagtggccactgcactgagcagctggtagcagcagtggtgaccatgtggactggggggtgggttggctgcttttgacagtgccagagaactcaaagaaatagccacacctgtcggagaccccagttcttgcccacctctgcatggacgaacctctcgccgaagtggagcctgccgccctccctggggtaagagcccatcctacatgtccccagacaggcctgggtggccggtggactatcgtcaaagggactgtgcagccagggttctccacacccaaggccgcccctgcactcccagcaggagggcgcccgcaccggcggcccgaaaaagtctgggccagcagacagcgcactcacgcccgagaccccgcaatgccgtgtgtccgcgacctcccgctcagggcgtcctcgggtcagggcgcagcgcggcccccgtgccgcttctggtgctcgttgaggttgcaacggtggctgaaaggcttcccgcactcgccgcaagcgtagggcctctcgcccgtgtgcgtgcgccggtggcttaagagctccgacttgcgcacgaaggccttgctgcagtgggcgcagacgaacggcctctcgccagagtgcaggcgctggtgctggcgcagctcggagctgccgcggaaggccttgccgcattctgcgcaggcgaagggtcgctctcccgtgtgcgaaagccggtggtgcgccaggccggaactgccgcggaaggccttgccgcagtcggcgcaggcgaagggcttggcgcccgagtgcgtgcgccggtggctcagtaggttggagcgctggctgaaggccttgccgcactgggcgcacgcatgaggcttctcgcccgtgtgcacgcgccggtgctccgccaggtaggagcccatgacgaaagcctggccgcactcggcgcactcgaagggccgctcaccagtgtgcgtgcgctggtgctgcaggagctgcgagctctcgcggaaagcctttccgcactcggcgcaggggaagggcttctcgctgctgtgcgtgcgccggtgctgccgcagccccgccacacgcacgaaggccttgccgcagtcgggacaggcgtgtggccgtgcgcccgcgtggatcttcaggtgctcggccaggttggagctctggctgaaggccttgccacagtcccggcaggcgtgcggccgcgcgcccgtgtgcacgcgccggtgctccaggaaattggagttccagctgaaggccttgccgcactccgggcactcgtagggcttctcgcccgtgtgcgtgcgtcggtgctgcaccagcgtggtgcttcggccgaaggacttgccgcagtccgggcagcggaagggcttcaggccgctgtgtgtctcctggtggtggatgagctgcgagtgcgcgcggaaggccttgccgcactccctgcaagcgtagggcttctcgccgctgtggatgcgctggtgctggctgaggttggagctccaggcgaaggccttgccgcactcggggcacgtgtacggcttctcgcctgtgtgcacgcgccgatgctgcagcaagtaagagccctggctgaacgccttgccgcactccccgcaccggcagcccggctcctctgggagaggcgaagggcgcaacgcccggtctgcaggctcgctcctgggcccagccccgtcccgcccaccgtctgcggggcccagctccctgccggggcctccctgttcgtccgccgcccccagtgtggcttgctgccgctggccgtcccctgcctccctcggaacctccgtggagttttcccaggccccccagcctccagacacagccccctcagagaggcccctcgtggcagtcttcacattgcagaggacctggccttcctctggggccacctgcagggtccaccctcttggggactccatctcgcgcctgtgacctaaaacaggagagaaaaggcaagtaccttagagaatacaaagaacaccagacagagggcctgagggggacacgacggtgggtgggctgtcatcccccactcttctcctccaggtccctggatgcccaatgccctctggagcctggagcaggaaggccagcaggcgggctagacactcgggggatgggccagcactctgggcctgcctgacagggccacgtgcacatccccacacccggcccggcccagcaggaggggagggggcgccagcatcgcagaaggactcaaagttgcccacgcacctgcactggccctactgtggcaccactctcctctccttgcttcacagggtggggccccaagtgtcaagaaggtggagactccagtttgtgaggaacacgatggacccgtctccattcctgaaggctggaggacaccgcctgacccaaacacagctatgtctgcctcacccactccaccctggccggatccctgggtagtcccctccacacagtatgggcagcatgtccaggctggaggatctcagtggctgttacccaggcaatgtccacaccaggcctctgtgcaggtcagaccaggtggtccaaggcatggggtggctgtgcagcccagatccctgagagagagagaggccaagggtgggagggcctccttggtcctaaggccatgcctgcctgtccagccgatccttcccacagcgaagtctctacagcgagcaaaacccatcctcatttgccctgagcaccttatcatccttgtgtagtctccagccccgctgccaaggcagggcagggacaagtgtgtagatggtgccatacctggaggtggggcctggaaggggcccaggggagcctcttgctcctctccctcctctgtcctggggaccagctcctcttggggcctgggggctggcacctggggacaggaaggcagcagggcagggtgaggtgttcagcctagcagatctgagaaaacaaggggcatgcggtggcatgacccacccttctctgcaccttcagttctcaggacacaatgcggagcacacaggtgtggactggagatctctgactctgccgtccaagccaagaccaccaaactcccacctgtcaccatcactttcccacagcccccaggccctctcagccaccaacccacgactggccccagtgctggctcagctggggtcgtgagcaggggaagcacacccagcccccagaccagcccccactcatctggagtcctggcccagctgactcctgctgtagccgctctgccagggcagtggcctcctcagggctgcctagccactgctcctgcgtgtaggcctggatctctgggagcagtgtgcccaataactgctccagcaccaagagctccagcatctgctccttggagcaggcctcaggcatcagccactggcaacacagctcacgcagctgagccagggcccctcggggccctgctgccttctcatagcagaacccccagaagcactggccagggctcttggagctgggctcacccaccatcagttccagtggactcgggaagacctggggggccagggctgatgcctcactcatctgggcagccatcctgcccctttcctgggaggggagtgcagctgcatggcccagggtactttctctgcagctggaaacacaaaggtgagcctgtgagcacagcaaggccacgaaggtcccctccttgggaccacctgagactgagtaaaaatggaagaatgggggtatcggcgtttctggcccccagtgtcagcatctttgcccacctgtgtgtccaggtgcctgagggacacactgaggtgccatggctgcttgtaccatcccttccccccgcctccccgcttttcttgagggtccctgccctgccctgtctccttggcacccttcatcccacacacagaacaactaagacagagactgtgaacaggacacccagagtcagaccagcagatgggtcctgtttgtcccctccaggaagtgttttaaaaatttaagttaggccaagtgcggtggctgacggctgtagtcctagcactttgggaggccgaggtgggtggatcacgaggtcagcaattccaagaccagcctggccaacatggtgaaaccccgtctctactaaaaatacaaaaattagccaggcgtggtggcaggcgcctgtaatcccagctactcgggaggctgaggcagagaactgcttgaacccgggaggtggaggttgcagtgagccgagatcgcgccactgcactccagcctgggtgacaaagtgagactctgtctcaaaaaaaaaaaaaagagaataaatactgatacatactacaagatggatgaatcttgaaaatattatgctaagtgtaaatgaaaaaattcagacacaaaagacttcatattatgttattccatttatgtgaaatgtccagaacagataagtctgtaagagacagaaagtagatcagcggttgccaggatctgcagggaagagagaaatgggagatacagccgtgggagtgatgaaaatattctggaattagtggtgatgactgtgcaacactgaatataccaaaaaccactgaattacacactttaaaaggatgaattgtatggtatttatgttttttaaaaaagttaccacccaatcccaaaagcttaaaaactgtatgactccatttctttttctttttctttttttttttcttttgacagggtctggctctgtcatccaggctagggtgcagtggtgcaatctcatctcccaggctcaagccatcttcccacctcagcctccgaaggagctgggacatcaagtgcgtgccaccatacccagctaatttttttattttttatttttctatttttgagacggagtttcgctctttcacccaggctggaatgaagtggcgcaatctcggctcactgcaacctctgcccccaggattcaagcgattctcctgcctcagcctccccagtagctgggattacagatgcctgccatcaggcctggcttattttattttattttattttattttttagtagagatggggtttcaccatgttggccaggctggtcccgaactctttttttttttttttttttttttttttttttttgagaagagtcttgctctgtcgcccaggctggagtccagtggcgctatcctggctcactgcaagctctgcctcccgggttcataccattctcctgcctcagcctcccaagtagctgggactacaggcgcctgccaccatgcccggctaatttttttatatttttggtagagccggggtttcaccgtgttagccaggatggtctcgatctcctgacctcgtgatccgcccgcctcagcctcccaaagtgctgggattacaggcgtgagccacggcacccggccggtgggccggtcctgaactcttgacctcagatggtccacccgcctcggcctcccaaagtgctagtattacaggcgcgagacacctcgcccagcctatgcaacattcgtaaaatgacaaaatggtagaaatgagaacagattactagttgacaaaaagaggttaacggggagcagaggtaggagggaagggtatgcggctctgtaagggcaacacggggatccttcgtgatggaaatattctgcatctcagttgtgatattgtactctagtttttctttctcttctctttttttgagacagagtctcgctctgttgcccaggttggagtgcagtggcgtgatgtgggctcaccgcgacctccgcctcctgggtacaagcgattctcctgcctgagactcccgagtagctgggattacaggcaccagcctccacacccgcctaatttttgtgttttcagtacagatggggtttcaccatgttgctcaggctggtctttaactcctgagctcaagggatccacccgccttggcctcccaaagtgctgggattacagacatgagccaccgcacctggcctctagtttttcaagatgccacctttaggggaattgggtaaagcgtacatagggtatgcattacttgttactgcatgtgaatttataattacctcaaatcaaaagttaaattttaaaaaaacgacatctgatttcaataaaaatccatatttgtgtattgaagtatcagaaatccgggtcccccaagggcccatgtttcttaaggcggagccaggcaccgctgcccctccatcctgtggtgtgcgaccccgacccgccagcccccagccgcatctatcagggctgccgtcctgagtccgtcctcgtcgtgggatagcatgtgagccccgtaaggtccttcctgtcggcctcactgctccagcctccccgacgtcctcacgtccacgctgcgtgccctttctgagcctcaacgcctcctcctcacctcgacatgatcagagccacctcccgcgtcagtcccagcgcccacgcccccaacaacgggcacttgtccgaccagtcacgggtacttgtgtctcccccacaacccccaaggcctaggctggacaaacaaatacggagtggataaaggggaggaagctgcggccaggtggcgcgaggcctgtgcgggcagctccggaggctgggaggcgagcccagcctggtgagctccgaaactacccggggctggggactgatgaacgaataaatgaatgtgggaagaaatgatggcgcggcagggcatgagtgaatgagtgaaagaataaacgagcaggaggaacgatgccacagaactgatcgccataaggctcgcgttcaccgagagaacagcaaacgggagccatttccgtcccgaccacggtcgcctctggcccgtgcagggccacttccgggccgctctggacggcgcggaggcctatctctcggtggtcccagagggcccagctcagggccgaggcccgtcctgccccgcgcggcgggagtggttggagccggagggcggatctgtgcctggccgagggtgtccgtcggcgtcactcaccgtcctcggcccgcctctgcgtccactaggagcggcctgaaagaggcccgcacgcgggctcgagccgcgtggaatggtaggagggcgggcaccgggtctcctgggggcgcggttgcattcggcagagcggcccaaggcgtcgcgtttctccccactgcgcctgcgtaactatgccgcggctgcgggcgcgcgccttctggttcccatggggacggcgccacagccaagctactcgggcgtcctgcgttgccatggatgcgctccgccccttcctgcacccggccagcctctgcggcacacacccaacagctacacaggcgcctggggctgcccgggtcgcggacgcaagtcgggccaacgtagcttctccctggcggtcctcctccggccccaggccgtctttaccaccctggaaccttgctgagttgacgccactgagctgcgtctcacacccacgcgctgtggaacacccaccaagctggaatccacgcggtttttaaaatagagtcgggggccgggcgcggtgactcacgcctgtaatcccagcactttgggaggtcgaggcgggcggatcacgaggtcaggagatcgagaccatcctggctaacacggagaaaccccgtctctactaaaaatacaaaaaattagccgggcgtggtggcgggcgcctgtagtcccagctactcgggaggctgaggcaggagaatcgcttgaacctgggaggcggagcttgcagtgagccgagatcgcgacactgcactccagcctggggcgacagaacgagactccgtctcaaaaaaaaaaaaaaaaaattgagtcgggatctcagaagctaagcagggtcgggcctggttagtacttgggagaccgtctgggaacaccgagtgctgttggctaaaataaataaataaaccgggcgcggtggctcacgcctgtaatcccagaactttgggaggccgaggcgggcagatcacgaggtcaggagttcgagaccagcctgaccaacatggtgaaaccccgtctctactgaaaatacaaaaattaggcttgttggcgtgtgcctataatcccagctactcgggaggctgaggcaggagaatcgcttgaaccggggaggcagaagttacagtgagctgaggtcgtgccactgcacactccagcctgggtgacagagcaagactccgtctcaaaaaacaacatagaccagatgctgtaagctaaaataaatgaatagctagagacggggtctcgctatatggcccaggctggtcttgaacttctgggctcaagtgatcctcccaccttggcctcccaaagtgctaggattacagacccgagccactgcacccggcctccacgagctctttttgtaccaatttttcccaatttgtactagggagctctcacctcagcccaggtggtttgggcaggtgtgggtacatggcccaggtccacagcacagggcagtccatccctctggccctggcagtggtcactttggacctgtgagcatcgtgggacttctctctgaactgttagggcctctatctgctttgaacctgaggctgtgagcatctgtcagctggggcagctgcagccttcttgccccgctgaaggatgaatctgttaagagaatggagtccatacagaaaagcagaactgagggatggtgtgttagtttcctgtggttatgcagcaaattaccacaaatttggtggcttaaaacagcagaaatatattcccgcccagttctggggaccagaagtctaacatcgatatgactgagctgaaacaagatgttgacagggctgagctccctctggaagctctaacgtagaacctttccttgcctttttcagcacctagagctgcattccatgtattccttggcttttcgtcctttcctccatcatcaagtaactggtaacatcttactatttctctcattaagttaaaatatttaacatatgttcattttatcttatttgcatgagagtcaattttagctttaaaaaaatttttattggccgggtggggtggctcaggcctgtaatcccagcaatttgggaggtggaggtgggcggatcacctgaggtcaggagttcgagaccagcctgaccaacatggtgaaaccccgtctttactaaaaatacaaaaattagccgtgtgtggtacatacctgtaatcccagctacttgggagactgaggcaggagaatcgcatgaacctgggaggcagaggttgcagtgagctgagatcatgccactgcactccaacctgggcaacagagcgagactccgtctcaagaaaaaaaaaagggggggaggcctgggcgcagtggctcacgcctgtaatcccaacacttgggaggctgaggcggggggatcacgaggtcaagagatcgagaccatcctagccaacatggtgaaaccctgtctctaccaaaaatacaaaaattagccaggcgtggtggtgtgcgcctgtagtcttggatcacccatgctggaagaattcagctgcccggacatgaggaaactcaggtctgcagtcctgtggagaggcagtggagcagtgcatactccaagcccagtggggccttcagatgattgcagtcttggctgccatgttgacttcaacctcgtgagaggccttgagccagaaccacaggccaagctggtcacgaattccccacccccagaaaatgtttgcgatgataaatgtttatttatttatttatttatttttgagaaagtcttgctctctcacctaggctggagtgcagcggcgcgatctcagctcattgcaacctctgcctcccaggttcaagggattcttgtgcctcagcctcccaagtagctgggattacaggcacatgccaccatgcccggctaatttttgtatttttagtagaaacggggttttgccatgttgcccaggctgttctggaactcctgagctcaagccatccgcccaactcagcctcccaaagcactgggattacaggcctgagccaccacgcttggcctggagcatgcccttgatgtgcaaactaaccaatccagagcctcacccctctacctggtccacacaccgcaggagacagtattcctctgtcttaatcatccccggaacaggagccaagcagctggggaacactcccacagctgaaagcccacaggaattactccagctagccagtcctgtgctgtaggctctgctctgccttgcttttcccttggaaaccccagtaaaggctctggcttagagctcccccttggtcctgcccctgctgcctctgacagatgctggtgcttttctcatgtgtccttccttgtgggccgtgcctcctgtttccaggatctgtgagcatgatgaactttgttttcctgagcttgtcctgtgtctcctcttctggccacacctgactgagcagaacataaaagcgacagaacaccaggagggctgctgcttggggaaattgtgtgagaagagtcctgggggactaggggcagggcaagcactgctctccctctcctggaggctggggagagcatcaaggagactaccaggtaggaggaaccatgggcagggcctccctcatcaggatgctttccccacaacagagggatttaagcccctggtgggtgagtcctggattaaccaagacctgagccttttggggggtgcagaggacagaggacactgtgaggtgagtttctcctgggtggattccccaggggcctctgaggctggtttcaggccctgccctttggctgccccactggaagctctgagcatctacccttcagggacgctttccctggtctgaccttggcaagggcaaataagaggtactccatggagggtcaccaaggtctggggcgtaaacggtgcccatctgcacagtagcatgagggccacagagtgtggtaaatgtcagtgaccatcacatgcggtccccagtgtggctgcaggggccacttaggattcttctgttcggggtcccaggccacacttggggaaccctattggaagcaacaaggtctaggccctgagggcccagggctctgccctctccagggctctagctgagccacgtgcaagcatcctcccggccctcccagctggtgtgaggaggaaaccacagccaaagggcaaggtgctccacacagatatgtccctagtcagcctgccccattcggcctctggagtgggagccttgggtctgtctggaaccagtgtggatgaaatgcagggagaaactggaatcatagccatggacagccactcacatagctgggaagaggcatgctgtggtagatcccggtggactctcacctctgcggtgctggggacgttgtgccgacacctcaggcacccacttccactcacaccgcggaggcttggggagatgcggttcagtctggagtccagcggggggcgacaataaaggcgaccccgctcgtcagtcagaccagggcaagcttgccagggcttcacacttcaccaaagggaaccctttctgccgcgactaccgagctgccagggccgggacaggcagaagcctgccccgaggtctcacctctggagggttacgagctgtgccaggccggctacggtagagggtgtgcaaataccccgcggtcccaaggctcctgaagctgcctaagggatatgagagaccctaggttcgaatcctgcctccatcgtcttatgttcgtgcctcaggagagtcactttgccccgtttcctcgcataccagagagcccagtaacacgctccgcggctctgcggagaaaaagaccctagagatcgtggacacagcgtctgggccgtatcagcgcccactcgagattattactgcttatgcctgcaaccggatgctgtgcgcccggttagaaaaggtcaaataaaactcgagttaggggaagcctgtggacgccatgtgtacaaagtgaagtttaatcaaagttacaaacgttggtgggttttccgggacaaaggcccctcctcgacgcagggttcgcttgggcgacgcgtcgactctcggctccctgcagtcaaggcgcggcgcggcccccgtgccgcttccggtgctcgttgaggttggagcgttggctgaaggcgcggccgcaatctccgcacgcgtagggccgctcgcccgtgtgcgtgcgcaggtggcgcaccaggctgcagttgcgcacgaaggccttgccgcagtcgcggcagatgtagggcttctcgcccgagtgcaggcgctcgtgctggcgcagctcggagcagccgcggaaggtctttccgcactcggagcagccatagggccgctcgccggtgtgcgcgcgctggtgttgcaccaggcccgagcggcccttgaaggccttttcgcacagtgggcacgcgtagggcttggcgctgctgtgagtgcgctggtgccggctcaggttcgagcgctggttgaaggccttgccgcactcggggcacgcgtagggcttctcgccggtgtgcacgcgccggtgctccacgaggtgcgagaacagcccgaaggccttggcgcagtcggcgcactcgtacggcttctccccggctcccgacccccgtcggggactccgctcgctgtagtccccgcagggcgggcaccccagccggaaggcgcgccgcgccaggacggggccacgccggtggcgctcggccgagtgcgtcttctggtggcggtacaggccggagcagcgcacgaaggccttgccgcactcggcgcactcgtagggccgctcgcccgtgtggatgcgctggtgctgcagcaggctggaggtgcgcgtgaaggccttgccgcactcgtcgcaagcgtacagtcgctgggccggggggtcggggacaatagggcgaggtcgcgaggtttggccgcactcaggacacactgggggactcttgcccgcctgctgctgctggttggggcggaagcgcttcccgcaccgggcacacggacggggctcctccgtcgcctgcagcctctcctgggggatccgcagggccctccacgcaaaggcctcgccgcacgcgcaagcccggggctgctccaccaaggggttcctcccgcgggaggtcggctttggggtcctcgggcaggtcggagcgccagtccctggttggcacggccaacagtccgtgtggacctcacacagttgagtccgggggtggttctggatccgctccggacaggggtcacacacgggtggcgtctccccagcgggcgccccgcgatgccacgccaggcaggagttcctgctgcagtccccgccacgcgctgggctcctacaggggccctcccgggcttgcagcccctcggggataaccagctcagggttctgagaagaggtggggccgcacggctcccgcacgaggggtctggtcccggcgctgtgccgggtccccgggccggggctcaccccgaggctgcagccccgggagcccccgcctgggggagtcgtcctaccgcccgccgctccacgcaggtcccccttttgagtggggcggctcccagctcggtcctcttcgaggggcctcggctcctcgggcctcttctcccgggccccggaggcaccctgggcatcggccttggggagtcctccctgcccagccttctgggctggagcctccatcctggggcgcagagttctggttgtaggatctggaagagcagagaagaaatggaggttggcggttcccaggaggagagaagtggagaactgggccaacgagcgaccaccccacagctggcacctactgggcggcccccagctctctgcagatgcgaaagggtaaatggagtgacataggcagcccgtcctgcccctcttcaaattgtcaccacccagaccccagagaacagcttcccaggctctgcctgcccgccatcaccgttcctccccaacactagctcctaaaacactgtgcccctggctaaggccctccctggtcccccttccccaagcaacagggactcccccgttgctcagctgccagctccccaaaatctcacttactcctgccctccgtttctcagtggcaagccgacactccgggtcctcctggctccattcactgccattgtccatgtcttctgagaggtgtgaggtgagactcacctgacagctgagagcctggccgggagatccacgctgcagaggccaatgctggacttcccctcccctcttcaaccaggtaacggtggtgctctcaaggctggcagcctcatctacaaaatgggtatgataacggtaagtataaccagctgagtagggagacaggcagcccagatcattcaagcaagtgtgaacattagcaacgcctggcgcctgctattactattttaaaattacactgtggctgtattagttatctattgttaaagctgctttaacaaactgccaccccatagtggcttgagacagtgcaaacttgttatctcagagttctggaggtcgtaagtcctaagtgaaggtttcagtagtgtgggttccttccagaagctcttggggaggacgtttgctgaccatttccagcttctaggtgccacctacttttctttcttccatcttcaagccagcagtaagacatgttcatctctctctttctgggtttgttgtcaaatctccttatactccttataggattctgacccttctgcctcttgtgatcacactaggccaaccacacataatccaggaatctccccatctcaagatccaaaacttcatcacactcagttcttttgccttgtgaagtaacatagtcagaggttctaggaaacaggacgtgcagatctttcagggggccattattctgcttacaacagtggactttgctgagatacacacacgtgcatatataaatattcatctcctaagcaagcaattgaatagcaagtgaaaacaaaggacggccgggcacggtagctcacgcctgtaatcccagcactttgggaggccgaggcagatggatcacctgaggtcaggagtttgagaccagcctgaccaacatagagaaaccccgtctctactaaaaatacaaaattagccaggcatggtggtgcgtgcctgtaatcccagctactcaggaggctaaagcaagagaatcacttgaacccgggagatggaggttgcagttagccgagatcgcaccattgcactccagcctgggcaacaaaagtgaaactctttcaaaaaaagaaaaggaaaaaaagaaaagagagagagagggagggaggggtgaaggccggggggggggagccgggcgcggtggctcacgcctgtaatcccagcactttgggaggcctaggtgggcagatcacgaggtcaggagatcgataccatcctggctaacacggtgaaaccccgtctctactaaaaatacaaaaaattagctgggcgtggtggcgggcgcctgtagtcccagctactcgggaggctgcggcaggagactggtgtgaacccgggaggcggagcttgcagtgagccgagatcacgccactgcactccagcctgggcgacagaacgagactctgtctcaaaaaaaaaaaaaaaaaaattgccgggcatggtgatgcatgcctgtagtcccagctactcaggaggctaaggcaggagaatcacttgaacctgtgaggtggaggatgcagtaagctgggattgggccactgccctccagcctgggcgacagagcgagactccgtctcaaaaataaataaataaataaatattttcctcattgtgatgtgatgtgaggtttctcagcctcacacgtgataagtgcacaatcctcctgtcccctccctagatctcattgtttccagaacaaagatggatctgtccagcacagcctttagactctgaatcccggatggctaacatcatatgcagagcgtgagatggacacacttgtggcaccctcgtaaatcactgcttcactcggcacaggagctcagattcttctccttttgtcctgtgttccctattctgtgcaaggcagatatcctcttattttattttatttattttggtgttttttgagacagaggctctctctgtcacccaggctgcagtgcagtggcgccatctcagctcactgcaacctccgcctgctgggttcaagcaattctcctgcctcagcctcctgagtagctgggattacaggtgcctgccaccatgtctggctaattttttgtatttttagtagagatggggtttcaccatgctggccaggctggtcttgaactcctgaccttgtgatctgcccacctcggcctcccaaagcgctgggattacaggcgtgagccaccgtacctggccagatatccctttatttatttgtttgtttgtttgtttatttttatttatttagagacagggtttcactcttgttgcccaggctggaatgaagtggcacaatctcagctcaccgcaacctccgcctcctgggttcaagcaattctcctgcctaagcctcctgagtagctgggattataggcattcaccaccaagcccggctaattttgtatttttttcttagtagagccggggtttcaccatgttcacggggctggtcttgaactcctgacttcaggtgatccacccgtctcggcctccccaagtgctgggattataggcgtgagtcaccgcacccagccgatatccatttattaaatgtctcagagggccgggtgtggtggctcatgcctgtaatcccaacacttggggagtccggggggggcggatcacgaggtcaagagatcgagaccatccttgccaacatggtgagacgtccttgacctgatgtcactttttctgtctgttttgcagatttctaacaggcagttgccctgggccacctggtggcctgaaataacttgaccgggaactaaaaggactcacgaagcatttaaccaagactctacatgttgacttttcagccaaggacacttcagagcgactggctgcagttctccaaaggaagctgctgccagttgcccctggggggttatttccttcttggacatcatgaccacaatggcagaaatgcattgatggccagcactctggggatgaatgtttttgagtggaaatgaaacataccaaactggttaaagacaaaaatgcagagttggacaagttctgcaggtcacgaaaggcctttgaagcagccaggcccggttcctgctctgctgtatgggaggctgctggcctgagctggagagcagaaaggcccagtgccaagggttcagcaagtaccagtcccaggccaggcatttgctaataagccagggtgacagtaaggacaaggggactctggtgtgatgtgaggtttctcagcctcacttgtcacacgtgataactgcacaaccctcctgtcccctccaggcctgtgtgagacaggaaaggtgaggctgcctctccctctgcaccttaaagccactcggggtctgggttttcctgagacttcccggagccagatgcagactcccaaaggcgccgatccttcctcgatctccctccctcaagagtggcactaatcaggtctaatttagagaaaatccatcacctccccccactgtgggctctgccacttcatgccttggtctctccacctatcagccagctggagcctgggactcaaggaggcatgcttggaagtaaggaacttctctgagtacgaggacatctgggtggtgctgaacaccagcatgctttgccccgtggcctggactgtgcacagggcacctagagtgacctgtcacctcccacgcaggtggaagggtgtgagagagaatgggcactcagttacaaacatccccttcccaaacacttgtggatctgagtctgaggctactccttccaggtgaggggttggctgctgttgtagcttgttactctctttctgtcccttctgccctcaggtcttgaccatgcagcttcccaagaacaggatggggaatgatatgggcacatggggaggcaagcagccacaggcctcacctgctcatgggcactgaccgtcccaacagcaggtggacatgaatctaacccacagacaccagagtagagggagctgggctccctgagtctggatggggttctcacaggcccccacagggagacaagggaagctttctccagaatgtggagtacggactcactgtgtgaataaagtaaatgagctggagggggcgggacaagatttcaaaaagcaccactcatacacccaggactggcaaagctgctggcagtaagctctatcatggggctcccccactgcaggtgagctgattggcctcagctggcaccatccatgctcagtgtttgccctgaggacaagaagacatggcaaaaaagaggaaagtacagaacacactcccacctggctggtggggatatagatagtgcagctgctgtggaaaccttcagctccacagaaaggtaaagatggagctaccacaccccgagtaattccacccctaggtatccacccaagagaaatgaactcaggcattcaagcaaacactggctcacagatgttcagagcagcgctgttcacagtagccaaaatggagaaacaagccaagtatataaaatgacaaatgcataaataagatgtggtatatccatagaatgggatattattcagccataaaaatggatgagtactaacacatactgcaacatggactttagaaaacatggaaagtaaaagcagtgagtcacaaaagaccacatattgcataattccatttatacgatatatccagaataggcaaatccacagagacagaaagtagactggtggtcgccaggggctgaggggaaagagtggggagtaattgctttacgggtatcaagttttggggtaattaaaatgttctggaaattatagtggtgatggttgcacaacatagtgaatatattaaaacctaaaaaatatactaaaacctggccaggcggtggttcacacttgtaatccccgcactttgggaggcgaaggtgggaagattacttgaggccagttcgagaccagcctggccaaaatgtcgaaaccccatctctgctaaaaatacaaaaattagccgggtgtggtggcacattcctgtagtcccagctacttgggagactgaggcagagaatcactggaacctgggaggtggaggctgcagtgagccgagatcgcaccactgcactccagcctgggcgactgagcaagactccatctcaaaaaaaaaaaattatatatatatatacacacacacaaaaacatggccgggcacagtggctcacgcctgtaatcccaacactttaggaggctgaggcaggtggatcacttgaggtcaggagttcgagaccaccctggccaacatggtgaaaccctgtctatactaaaaatatgaaaattagccaggtgtggtggcaggcgcctgtagtcccagctacttgagaggctgaggcagaattgcttgaacctgggaggaggaggttgcaatgagccgagatcacaacactgtactccagcctgggcaacagagcgagaatctgtctcaaaaaaaaaaaaaagtatatatatatatatatatatatatatatatatatatatataaaattacatatatacttaagagtatatatttatatagaatgtaaatatatattagagatatatatatactaaaacccaacctgaattgtaaaatggttcatttgttacatgatttatatatttttgttttgttttgttttgttttgtttttttgagacggagtctccctctgtcacccaagctggagtgcagtggtgtgatctcagctcactgcaacctctgcctcccgcgttcaagcaagtctcctgcctcagcctcctgagtagctgggattacaggcatgtgccaccaagaacggctaatttttgtatttttagtggagatgggatttcaccatgttggtcaggctggtctcgaactcctgacctcatgatccgcctgcctcggcctcccaaagtgctgggattacaggtgtgagccacctcgcccagctgatttatatctttttttttttttttaaagcagaatgcacccatgccacagtgctccttcctgcagcctgtcaggcgtcggcccaccctgcaacatccaggatgtcatttgagccctggtcacacgaaagcactgcatgggatgaaggtggtttatttatttatttttattttattatttatttatttttttgacacagagtctcgttctgttgcccaggctggagtgcagtgacacaatctcggctcactgcaacctctgcctcccaggttcaagcaattctcctgcctcagcctggcgagtagctgggattacaggtgcctgcccccacgcccagctaatttttgtattttcagtagagatgaggtttcaccctgttggcctggctggtctcaaactcctggcctcaagtgatccccctgcctcagcttcccaaaggtgctgggatcacaggcacaagccactgcgcccggccgaaggtggtttcttttaagcaatacatttgtattgagaaaaacaagttcttggccgggcgcggtggctcacgcctgtaattccagcactttgggaggccgaggcgggcggatcacgaggtcaagagatcgagaccatcctggctaacacggtgaaaccccatctctactaaaaaaaatacaaaaaattagccgggtgtggtggcaggcgcctgtagtcccagctactccggaggctgaggcaggagaatggcttgaacccgggaggcagagcttgccataagtcaaaatcaggccactacactccagcctgggtgacagagcaagactctgtctcaaaaaaaaaaaaaaaaaaaaaaaaaaaaaaaaaaaaagaaagaaaagaaaaaaggaaaaaaaaagagaaaaacaagttcttttaaatctctaggtaaaaataaaataatttctcacacacagccaagtcaactgcataccagagtaccaagcatagtttccacatcagaggcttaagctctggggtaaaagcattttctttaaccaggtgtctgttaattcactcatatcaaagagaaaacttggctgggtgtagtggcttatgcctataatcccagcactttgtgaagccaaggtgggtggatggcttgagcccaggagttagagaccagcctgggcagtatggtgaaaccctgtctctattaaaaaaaaaaaaaaaaatggccggacgtggtgactcatgcctgtaatcccaacactttgggaggccaaggtgggtggatcacgaggtcaggagattgagaccagcctggctaacatggtgaaaccccatctctactaaaaatacaaaaaattagccaggcgaggtggcgcgcacctgtaatcccagatactcgggaggctgagacaggagaatcactggaatccgggaggcggaggttgcagtgagccaagatcgtgccactgcactccagcctgggcgacagagcgagactccgtcaaaaaaaaaaaaaaaaggctgggcgcagtggctcacaccagtaatcccagcactttgggaggtgggcagatcacgaggtcaggagattgagaccatcctggctaacatggtgaaatcccgtctctactaaaaaatagaaaaaattagccaggtgtggtggtgggcgcctgcaggagaatggtgtgaacccgggaggcggagcttgtagtgagccgagatcttgccactgcactccagcctgggtgacagaacgagactccatctcaaaaaaaaaactatccaggtgtggtggtgcaagcctgtagccccagctgtcaggaagctaaggtgggatgatcgcttgagcctgggagattgaggctgcagtgagctacaattgcaccactgcacgccagcctgggcaacacagtgagaccacatctcaaaaaaagaaagcaaagaaaactcttcattagaaactgaacatgctcgctgggaatgatattcagggcacagggcaattccttacaggggcacacacccaagggcactgctgccaccacatgggaagttgtgacgggagggaggagactgagggcaggacacaagacatggagacacacattctggtctgtctgaccatggagctctgtccacacccaggctgcctgctggctcccaaccaccacacacagtatctggcgtttctcacaggtgtcggcttctctctctcgagtccatctgctggccgtggacctggctattcggggcaggcccatcctgcccacctccccacactctctcaagcctctgtctctgagcactgcaggttttgtagtgttccctcgtctacctctgagaggccaggctgactgaagagctcctgagaaagccaccaggacccactgctaaaggggttggtccagggtcattgccaggctgggatctgaggtccccacacatagggcagggaactccccagccatagactctgatgggggtaccagtgtggactccagccctttacacggaggagggagcatgccactatggatgctgagcagcaggaggtcaggggccccgctttcacaatgtgccatcccagaagccccacagccaggatctggacctctctgacacaactccaggtcacagagacccagatgtcagggatggagggacttgggcacctgccttgctattagctccaaggctgctggcttcatgtcacagtctgtacaacagctggtggcatgagcagggctaggaccagcactcagcatgacttcctagaactctagggacttaggggctgaggacttcccagggtgaaagaccatacctgggacagcctggccaaacagggacaattgatcaccatggaatcagtggacaggcccaagaatggatgggcacatgaggtcacccaggatcaggcaggttccactgaaggaggctgcaaaagatatatccaatgtcctaaccccggaactctcagaatgtgaccttattaggtctttgcagacataattaaggatcttgtgatgagatcaccctgaataacctgggtgtgccctaattccaatgacaggtgtccttatgaaggaggcaaagggagttctgacacggagaagagtggtccatgtgaagatggaggctgatattggagtgatgcagccacactccaaggaacacccggagccgccagaagccggaagaggcaaggaaagacccccacccagagccgtcagagagcacagtactgctgacaccttgatttcagacttctggcttccaggactgtgagagtaaatttctgttgttttaaactgcccagtttgtggtagtgtgttatagcagccacagaaactaatagagactggtctagcaccctcgacagaatgtgtgtgttgtaaggggctctcctgatccctagtgatggggagtcagaggactgcttagtgtctgaacagagggttggggaagctgggttgtcctgaagaaccagcagtccccacttggcagaaagggaccctgaacttgtgggaggtgggggctgaggggcacctgctagccatgtgctaacagcatcttcggattggtccccagatgccctgctcccaggggtggctcctctgctgcaacaagaacctgcctcccagcaccagacacagcaggtgggagctgtggaccatggccgagtctcttcgtctccttgatctgctcccaggatgcactgtccaactatcccacctgtaggtgggtggcattccagccatggacccatgatctgaggctgagcacagcaaacacaatcgaggctctgggtcccaggtcccaggagcccgtccttgatggtgcattacagctctcccaggctgttcttacagtgacctcccacctgccccaggtgagcatgcttgcacctgggtgctcgcccagcctttctagttgtccttagggcttctggtgttgggaacaggatgcagagttaccaatttagggggactgagaggttaacgtggccaaggctgagccctgcagaactgcagagcaacagcacacacaggaaagctagtgaggttcaacatcctcatggaggttgcacacggcacaatgaggtcttatttgcccaagagaatgtgcagggaagtcgccaggcacggtggtgcatgcctgtaatcccagctactcgggaggctgaggctggagaatcgcttgaacccgggaggcggaggttgcagtgagccgagatcgcgccactgcactccagcctgggcaacaagagcgaaactccgtctcaaaacaacaacaacaacaacaacaacaaaaacagaatgtgcagggaagtcaacgttggtggctctgaggtgtggaggacacaggctagtgcccagctcagcgtggctccacctctctgagccacagaccaacctcacccacactgacagtcccaggggacacagactctagcccctatgtccaattctacactgtgcacgcaatgggaagaacagtgcatcatgcactgtacagcagaagaaatgtcctctgagtgcaggcacagctcccttctgtgtctgtcctcccgacagtgcctccaccctcaaggattagcaagcttcaaccctcgcaggacatccactgtgtcagggccaaacggtgctgcatcctgctctaatagtgagtgaaggaggggaccgcagacaagaagaaatgaacaagagaccgtttaagagagaaaaagacgtgaagaacatcagacagggagcagcgcgagggcgccagggagggaggcagcggattcttcgggcctctgtgaagagggggcatgaaaccggtctgcagacaaggaaagagcaaagtgcaaaggccaggatgcgggggcagagacggtagggaggccggcgtcggcctcggctagcaggtgggcttgactccgagagccgcaggccgccaggatgggtcccgggcctggagcctcccctcgcgggcttcaatgacacccagcacggaaacgcgggggccagaactacagaagcccgtcccgcccggaactcaaggtcgcgagtgctgtgtggccggtccggacccggagcgcgaggaccggaagtgcgcggcgtcacgcctctgccccggaccccgcgcgcggaggtggagaggggactggggtggtggccgcgctatgcgccgggaggtccccgcctcgcaggccgaggttgcgggtccgcgcagaatgccacttactctctggaggcggcccgcacgggtccctggtccccgccccgcatgcagcgcggagccgtcctcccgccacctccgggccgccgcggcactgagggacccgggccacagcaagcgcaggcgggaacccgcgcggggactgctgggaaacgtagtcccgtcatgtcccgctttgacgctgcggagaaagcggtgtagggagaggcttgggcttcggttatcatagaaacagaggccggctacacctaaaaggcggggcgtggacctaagtcgtcgccaaagaaacggcgttctggacggggacgtagggtcccgcccattccttctcgtgaaagcgggtgactggtcatgattatgattgatagcctcctctcccaatctgatttctaagaggtcccaacccggaaccgacttgcggttcgcaggctcccctcgggtgggagagttgggctgggaagcacctggggagctctgaagtgtcttggtgagcgcgttgcgagtcagaccgataacatcagaatctgggactgggcccgagcatatgcgcgtcaaaactcctcagttaagtctatttttttgtattttttttggtttgcttttttgagacggggtctcgctctgtcgcccaggctaatgcagtgacaccatcacggttcactgcagcctcgacctcctgagctcaagcgatcctcctacttcagcctccagagtagctgttaacaggggcgcgcgccaccacgcccggctaattttctttcttctctccctccccctccttctccccctcccttcctcctcccactatgtcgcccaggctggtctcgaactcctgtactgaagcgaccctcccacctcaccctcccgaatagctgggactataggtgggagccaccatgcctggatagtttttttatttttatttatttatttattttagagatagggtctccatatgttgcccagactggtctggaactcctgggctcaagcgatcctcgtgtctcagccttccagagtgctgggagtacaggcttgagccactgcgccaggcccctagtccggctcctagttgattctaacacgtgcggccccattggggaaccacagcctccccagcccctttgggtgttgctgactctacgggccctcccaggtaggatgaactggtcacgcctcctacccatttgtaacccccagctcttgcccccatctattgtgtggctcctgccctcaatagggacatctaattttgttggccagtccagcacatatattgcatgtaacgacccagtttgccccacctttctgcctccactgcatctgcttcagggatgctgggactgttccactccctttctccatcctttgggtgtctgcacatcgaaagccttgtcaggaggtctatctccctgcccaagtacaaaactcagggcttaccaagctaattgagggcgagcaggaggctgaagggcacttggagggctgcccgccttgtgggtcccttggtggctgaagagagttgcacaggaaggccttgacaattgtcacagagaaaggagtgcagctgctggctctgtgtgggtgtgcagatgtctgacaggttcagccactggccccaattgggacacaagtgggatttctttttttttttcttttttgagacagtcttgctctgttgcccaggctggagtgcagtggccgcgatctcagctcactgcaacttccgcctcccaggttcaagcagttctctgcctcagcctcccgagtagctgggattataggtgcccacgacctcgcccggctaatttttgtatttttagtagagatggggtttcaccatcttggccaggctggtcttgaattcctgacctcatgatccacccgcctcggcctcacaaagtgctgggattcaggcatgagccactgcacccggcctgacacaagtaggatttctcacacctgtggatgcactgctactggaggagtcttgagcctatgtggaagaacttcccactcccaggcacagaaagggcctccctctggagtgaagattctggtggtaccacaggcctggccaccacacaaaggccttgtccctgcagggctggcatggggtgactggcagccctggagtggagtttgaagcaccaatgaaaggcctaaccacttggcaggcacaggtgcgggggacttgtctggaggggaccggctatgggggctgtgacagtctgtaggctttcttcacttctacacaagcctgttgtctaagtggaccctgcagggttcatgcaggggcagcaccagagaagcatcttgtgacaatggttacacaggagcgatttcaggaatgagactgaatcaggcaaggacctggagaggaagctccagtggggctcccacccaaggggtccaactttaccaatcccacaggtccccagtctggggctcattctatgtctgtaggcctgggaccctgcacccaggagagttgtcctgctaccggccatccctccgcagaggtccccctctggctctatgctgtcttcagcaaagggcctctgctccatttcacacctctcctgagggcctggggtagcttactgcgaagcagcctcagggaatagaggcttcagcagggcatcttggcccccaacacagaatcctggttgtaggatctggaagaacagaggagaaatggaagttggcagttcccaggaggggagaaggtgctggtgagccacgaaagcaaaccccagtggctgaagcatcctggatgactcggccacatttccttaagaatctttgtgtgtgtgtgtgtgtgagacggagtcccattctgtcacccaggctggagtgaagtggtgcgatcttggctcactgcaacctccaccgcccaggttcaagtgattctcttgcttcagcctcccgagtagctgagactacaagcgcccgccaccacgcctggctaatttttttgtatttttagtagagatggggtttcactgtgttagccaagatggtctcgatctcctgacctcgtgatgtgcccgcctcggcctcccaaagtgctgggattacaggcatgagccaccatgcccggccctcttctgtctcttataaggacacttgtcattggatttagggtccaccctactaatcctagatgctctcatcttgggatccttgactaaattacatctgcaaagatttttttccaataggtcacattcgctgggtctgggtattagggcatgaacttacctttttgggggccaccattcaatccattacaggtgggcatcccatagaagcagacagtggctaggccaaagtagcccatgaagtatcagccatgggcacaagatcaagtttgggatgcggcagggccaggcttggctctgccaggcaactgggtggactgaatccagcacactccaaacgagttgataatcaggctggggacttcaacagacaaccaaggtgccagtaaaggcattaaggagctatcacggccaggtgcggtggctcacacctgtaatcccagcactttgggaggccgaggcaggcggatcacgaggttaggagatcgagaccatcctggctaacagtgaaaccccatctctactaaaaatacaaaaaaaatagccgggcgtggtggcgggcgcctgtagtcccagctactcgggaggctgaggcaggagaatggcatgaacccaggaggcggagcttgcagtgagccaagattgcgccactgcactccagcctgggcaacagagtgagactccgtcacaaaaaaaaaaaaggagccatcacaaggatgtaagatcagctaacagtaagactgtggctggtagggtggacaggcaaagtgactgcctggagagtgggcaggtggcccagcagggcccagagggtgccttcccagaagtgaggagtccagtctggggccggccactcaggatggacacaatgtaccagaagtgaggtagatctctgcagagtctctggggtcctcatccagtctgaagaacacagcaccagcagccctagatctatgaggtcagactctgcatcttatcgtagcaccttggggacctggggaggctggaccaccctggacctggtggcgggggtggggggtgcatgagtctcggctctgcagtattcaccacgccacacttgagggcacctgccctctgcagcacgatgagtcattctcatgaggtctgtaaagatgtccattatcaaatgaccatggtagccaggccacagggttcacattgacgttgcctcattgcattctcatttccacactgaaggggaaaacaggttcagaggggtgggctcactgtcctgatgagtgctgcctgttttctcccaccctccctacaaccagcacccccatgcccctcactcaagaccagggagaagcccacctagcccctcctgcaaccacacagaccccagtgggagccccaaggctgctactctgcacaggatggagggcaggggtaaaggccattaggcggtggcagtaggccgtgcccctcaccagaggctgaggtctgaccccttgaccagcccagcttcagggcatgtgtcctttcatgagctgtgactgaccacagtccaagggcccactgtggggagtcctcagcatatttggacagaaacgccccagaattggggtaagaagagcctttacagtcaggcagtgaagaaacacagctgctgggcacctgctatgtgcacgcctcagggatgggagtagggggcaggcccagccctgggacctgggtcaggtggctgggcccttcggatcccgagttggagggataaccccttggaggcagagatgggcatcagagacagggcggccccaggtggtcctggagtcgcctcgtaaaggttatgtctatgcctgctgcaggcagagacacagtcaaagtagttgctacctctggaaagtcccagttctgctcatgagcctagatctaagaggctgggacaggcagaggggtatgaaggggtcatgggcaggcagactgtccacactggctgccagggtggccaagtgagtagagtgagctggggcactcactaccgtgccaaccccacgcacggatgaggaccccgggtcgaaggcccacatcctcaatcccacgcaatagttcaggccctgtgagagggttcgctgtctgctcccagccagggctgagctgttcagaggccctacctgttcagaggcagctgggggaagggacagaagttggggggcaggggattgtgtgctggcgggaataatctccttcatctcatggctaaatcttccatccctcctttcaacctttggccagaaacctacgtttctgacccttggagaggtcggccagttcaagaggcacccctgagagccacgtctgcagacacgagggcctcgtgacgtgagccctgagggcagggggctgcaacccctcgcgcgggctccccggccgtggaggacacaaggacaaacacgaagggtccccgacctgccgaccccctcctcccggacaccgcgcgtagcctgtaggctacctccgcgctccacccagagacgggtcgcgctgctcccgccgccgcaaccccgggccctcgtgccggcggtctcccctcttccacgggcgagattactgcatagcagaggtgaagggcgcggaggctgtgggggaacccagcgtggtatggcaggaaaggtcgagcagggaaacaggcccagccagaggctcgggatccggggctcgcgagcgtggtgctcctgggccgggcggtgggggaggggccgcgtgtggcaggcacatgcgcacggcaacctggacctgcggagggcggcggtgaccactgggcctcactccgctaacccaggtccgcatcaggcgcgtgccggtgaggcggctgtggccgcggcgaggagtcagagggaactgaactggctactcccgcggcaggtgggatttaaggtcagcagctgaacaaagaagcgagcgctggccagacttttttctttattagacatggctgcgttggtctcacggaaatctctgcgcttttgcaggcgcccacaagacagggcaactacggggtagcggacatccgccaggcacgcttctagggccgcttctgcaactgcgcatgcgcttgggctgcacccattccgtctagcccaaaaggttcctctacaaccttcctccggattggtctatagggacacgatggccttttacgcaagcgtcacccgtgctgacccggaagttttcttcccagttaaaagtgttggcccgcggcgcgcggcctcttcctgtctgtaccagggcggcgcgtggtctacgccgagtgacagagacgctcaggctgtgttctcaggtgagaccgccgcggggccggggatcctagggacggttcatggtctttcggggatagtgccccgcggcctgggccttttctcattaggtctcatttctgtctctggaaaagaaaatgtagaagaaacgggcgcgggccgagttactcttgacttctttctggtgctccgccgcttctagcttttccccatagcggggcttggggaacttggtttgaactatgcggttgtactctgagataggaagtttccatttcttagggacacgatgccctcttttgctctgtgtaactttccccccgtaatagcagcccctagagccttcatactgtcggtcaagaatcgaaacctttgggttgattgtgccacacggtacctaccgtggtccttgatgtcatataacggtcccgcctcacggccaaagaaacagtccgagacggaacgttgacttgggtcaaagaccatgtaaatcgcgagattgtggtttgaattacagcccatgcagtgtgaggacgtatggcatctgctgagccattataccttggtcccagtgcagcagctgttgactggtggctgccaagtcttgggcccaggggttctaggtgaaagacagatgcttcttgctgacagctgagtaatttttctagtgcttgaaaacacgttcacggcctttcttggtcctttgcgaccccccagttcatcactagatggcggctagcctcagagttgggaatgagtgcgcctttgctccatgctagctgagctctgacgtttttttcctgtcatcaccctgtcccaggatgaccgagtgggagacagcagcaccagcggtggcagagaccccagacatcaagctctttgggaagtggagcaccgatgatgtgcagatcaatgacatttccctgcaggtgaggggaacttggtgattggccttcctggctgggggcggacattattccaggaaggcacacatcaaacttgttgctgtgccattaagtcaagaatagagatcataacaggtaaagaagggatcccttgaccaccacatctaccacatctgctcttacgtcctgttcaaagatgactacaacttctgtcatgagaggactccttcaccagaaggagcatcacatctcacatatggtatttttgttactgtttttgtagtaaaatacataacatccagtgtcattcttttgcatgtgaatatccagttatccagtaccatctcctaaagagatgttttttttccctcaattgaatggccttggccacttgtcataaatcagctggccgtagttttttttttttttttttttttttgagacggagtctcactctgttccctgggctggagtgcagtgacgcgatctgcctaccgggttcacaccattctcctgcctcagcctcctgagtagctgggactacaggtgcccgccactgcacctggctgatttttttttttttatttttagtagagacagggtttcaccgagttagccaggatggtctcgatctcctgacctcgtgatccgcccgtctcggcctcccaaagtgctgggattacaggcgtgagccaccgcgcccggcccagatgtatgggtttcattacagactttcagttatattccactggtctatatgtctgtctctatgccagtaccacactttcttgctttgtattaagttttgcaattgggaagtgtgagttgtcctactttgttcctactccgtacggttttacacataccctttttttcccctccccatgaaggcatcattaagaattttgtgggccttaagaactttagcttttgtgagcccttcctccattaaaagaaagtgtttgaaattatattttgtgactgcattgatataaagatgaatataacttgggttgcactttattcactttcctcctctttttttttaatcattaaagttttatctttgagataagatcactctctgtcacccaggctggagtgcagtggtgtgatcacagttcactgcagcctcaatacacctgggctcaggggatcttcctgtcttagactccaactagctgggaccaaagatgcatgccaccaaacctgctaccttttgttttataaagaatgaaaacttttttgttgtctgtaaagatgtcaggggacttaggcactatgcctaatggataattcagccttgtttttcactctgaatatcttgtagatcttggcttttctttccttcaggggtttatttcggggggtccaaaaacattttaaatattattattattttttgtttgtttatttatttatttatttttttgaaacggagtttcgctcttattgcccaggctggagtgcaatggcacgatcttagctcaccacaacctccgcctcccgggttcaagcaatgctcccgcctcagcctcccaagtagctgagattacaggcgcacaccaccacgcctggctaatttttgtatttttagtagagacggggtttcaccatgttggttaggctggtctcgaactcctgacctcatgatctgcccggccacattttaattatttatttattttttgagacagagtttcgttcttgtcgcccagtctggagtgcaatggtgcgatcttggctcactgcaacctctgcctcctgggttcaagcgattctcctgtctcagcctcccaagtagcggggattacaggcacatgccaccgcacccagctaatttttttatttttagttgagacagggtttcatcatattggtcaggctggtctcttaactcctgacttcaggtgatcagcctgcctcagcctcccaaagtgctgggattacaggcatgagccaccacgcctggcgttatttatttatttgtgagacagagtctctctctgcctcccaggctggagtgcagtggtgcgatctcggctcactgcaacctctgcctccccagggtcatgcgactttcctgcctcagcctcccgaagtgctggggttataggcatgagccactgcgcccagcccacaaacattttcattataggcccagataatgttttagactttgtgggccacactggccactgttactttttttttttttttttttttttttttttgagatggagtcgctctgtcacccaggctggagtgcagtggcacgatctcggctcactgcaacctccacctcctaggttcaggtgattttcctgcctcagcctccctagtagctggaactacaggtgcatgccaccacacctggctaatttttgtctttttagtagagacagggtttcaccatgttggccaggctggccttgaactccttgatctattaaacgtttgttaagtgcctgttccactagggaaataaacatcaatgggagttcactgtattttaaacacctgtgcagggctccactgttgggccaaacccttcctggggaatttggtgtttgcaattttttgctgcatagtgaaagccctgcgtgaatgcccttcacgagactgtgagttttttttttcttgcagccagactatgaaatagtactgagagtttcagtgtcctgtgttcttttcccatcattccttgtatttgtagaaacaggtattttgtgtatattctcagaggcaagtgatagaatggccttgggtacattttgtaatggaactatcaacagcagtctccttcgaatgcacatagctcctttcttcccctttacatactcaaggttaactttttggcatttttctagatttttgtgtggggatggctatgtaagtataagaagacttgttaaatgattgttttaaaactgtggttctgggccgggcgccgtaatcccagcactttgggagactgaggcgggcagatcatctgaggtcaggggtttgagaccagcctggccaacatggtgaagccccgtctctactaaaaatacaaaaattagccttgcatggtggcgtgcacctgttgtcccagctacttaggaggctgatgcaggagaatcgcttgaacctgggaggtggaggttgggatgagctgaaatcatgccattgcactccagcctggccaacaagagcgaaactccatctcaaaaaaaaaaaaaaaaaaaactgggctgagcatggtgacgcatgtctgtaatcccagcaacttgggaggctgaggcaggagaattgcttcaacccaggaggtggaggttgcagtgagccaagattgcaacgttgcactccagcctgggtgacagagtgagactccatctcaaaaacaaacaaacaaaaaacccaaaaacaaaaaagttctcagccaggtgcagtggcttatgcctgtaatcccatcactttgggaggctgaggcggacggatcacctgaggtcaagagttcaagaccagcctggccaacatgtccaaaccccagctctactaaaaatacaaaaattagcctggcatggtggcatgcacctgtagtcccagctactcaggaagctgaggcaggagaattgcttgaacctgggaggcggaggtttcagtgagccaagattgcaccactgccctccagcctggaaggcagtgagactccatctcaaaaaacaaaaaaccaaaaaactgtggttcctactctggggtggttggtttcctgtcttagagaacacttagcaatgcctggatacatttttagatgtgaaaactgaccggggtggtgccaggcactgtggctcatgcctgtaatttcagcactttgggagcacaaggcaggcagatcacttgaggtcaagagttcgagaccagcctgctcaaaacagtgaaaccccttttctattaaaagtacaaaaaatttagctgggcttggtggcgcgtgcctgtaattccagctactcaggaggctgaggcaggagaatcacttgaacccaggaggcagaagttgcagtgagccgaggttgcgccactgcactccagcctgggtgacagcaagactcagcctcaagggggggaaaaaaaaaactaggccaggcgcagtggctcatgcctgtaatcccaacactttgggaggccaagacaggcggatcacaaggccaggagttcaagaccagcctggccaacatagtgaaacctgtctctactaaaaatacaaaaaaactagctaggcttggtggcaggcccctataatcctagctactcgggaggttgaggcaggagaaccatttgaacctcggagtcgtaggttgcagtgagctaagatggcaccactgcacaccagcctgggtgacagtgagagactcaaaaaaaaaaaaactgaaggggttgccagtggcataccagatggctgttaaacatcctatagtgtgcaggacagccccccagacaattatctggtccaaaatctagtctccttagattcccactcttccattacgaaggaagtgtactttttagcgacttggtaaagtcacctgttcagggtttttttcctcatggtggatggggcttacatccaagtcccctgttgaggcataccaggatcccagacagctgttggactaccccgaatgggtacttgatctctcctctggtgtctggccaacgcccatgctgctcctgaccattttcccttcatttcctgctccctgctgccccaggattacattgcagtgaaggagaagtatgccaagtacctgcctcacagtgcagggcggtatgccgccaaacgcttccgcaaagctcagtgtcccattgtggagcgcctcactaactccatgatgatgcacggccgcaacaacggcaagaagctcatgactgtgcgcatcgtcaagcatgccttcgagatcatacacctgctcacaggcgaggtagggctctgtggcctggtgagggcaggctgtgccctcagtacacccgaaagccccacggagtgtatgtcaggcttatcccctgtgtggtgtggtcactcttgttttaggtatgaggaaaggggaggaatgcatggggctggatgtcaggctcatatcccccttctctctagaaccctctgcaggtcctggtgaacgccatcatcaacagtggtccccgggaggactccacacgcattgggcgcgccgggactgtgagacgacaggctgtggatgtgtcccccctgcgccgtgtgaaccaggtgagcctggggcttatgcacgtggcagggtggacacagccacgggagtgggtggggtcttgcctggggcaggaaggctcctctctgtctgcatgttttacctgcagcatcacttcctctaggaagccttcctggattcccaccctgcataggggctgatccaggctctgggtcctcttcgggaacacatttggcagaggtcttctttctttcctttgggtgtatatttttacactgtgtgtatatgtactttttttttttttcttggacattttgagaatcagttgcagacattttgattgtgttttccctgaacactgcaggtgtctttaaaaacaaagatgacctacccccgtcgtcacccccaggaaggaatttatattcacagcaatagtcgttgttccatttagcatctgtccccagaatgccagaatgccctttatagtggcgcattgtcaattgggtccaagttaaaagcaaatatattgccttgttttttagaaataattgagatggaatctcagggtgttcttgaattcctggtctcaaatgatcctgtcccctcagcctcccaaagtgctaggattacaggcatgagccaccacacctggccgccttttttgttgtcgtcggtttttttgtttgtagaggtggggtttcaccaagttgctcaggctggtctcaaactccctgccaaagtgttcctcctgcctcagcatcccgaagtgttacaggcgcaagccaccgtgcccggccgtctagcagtttgctgttgaggcaggtctcaatctcctgtcactggggacgcaacttcagcctgtgtgtgtgtgtgtctggacacttgctcttgtgaccctctatctgattgcaaatcaggcatgatgccaccacctcttgtctcagtgggcctatgggtgacaacgtggctggcagcatcagttgggagtggccccagggtgctggaggaccgcagtctgtccttctagcctgacccctgctgtcttcctaggccatctggctgctgtgcacaggcgctcgtgaggctgccttccggaacattaagaccattgctgagtgcctggcagatgagctcatcaatgctgccaaggtgggtgagggcactccggttggggggtcttaagttgggcatttgtgggggtccttcagaattcagagctgtgtgtctccttgcagggctcctcgaactcctatgccattaagaagaaggacgagctggagcgtgtggccaagtccaaccgctgattttcccagctgctgcccaataaacctgtctgccctttggggcagtcccagccacctgtgctgttgtctgtcttcggtggggggatgtgggtggcatagccctggtggccttgggagctgctcaccttcctgacctgttggcctgtggggacctggaagtattgctgactcagaaccatggcaccccagggctagcaggtggggcactggatgcaggccaggctgcctggagtgtcccagcaggtactggaaatgagatggggttatccataacttctgagggcgtggcacatgagatgttgctgtggtctgggtggatgggtggcttgggtgcctgtgaggtctgggtagtcacaagaccatcctgagaggcttgtcaccttgaagtagcactggggagaggaggaaagctcagctgtttagggcacacgatttcagacccctagcttcacccccctcttggagtgtggggtggtttcacactggcgaggttgtgctcctggttacctccccggctacactggttgtggctgcaccctgggcctgcacacccagtttctgtgggctgtacgggttcccttctgccagtgtccatgcagtgtcatcaggctgctggggacaggttgggacccacccagggccacaggctggtgactctggtagaagactcatcaggttctgaagggtggggtgggcccaagcccacccaccgtgtgccatcacccttccaccgcccccaacatctggccaagacaggcttggtgttcatcctggtggggctggcccagggggcggggcaggcagtcaaacgggtccagcgggtacctgggacctggaggggtggtgccggttgagcaccctccccctgggagggtacttttgagcccagctgctggcaggccaggaacagacagggacacgccactggccagagggaggaggcttccacaggtaggaaggcgcccacaggctggctgcggtctgtcattactctgtggggggtgcctatctctgctcctctgtgggtcaggtcctttccatccctgtctggggtcctccccatctccgtgttcaactgcggtctgtctctccgtttccaattcaggaactggtaccccgtgggtccattcctatccccagtctccgcctcgggcctccccatctcccctgctcctcgacgctagctacacccttctcgggatggggtgctctgtactgggggatcctctctaaagtacagtccccagtcttccctggattccctgctggtctcagaacccgctccaggctccaccgcctccttccctgcctgacctcctctcctcccaggtccatccggatgccctgccctcggccgttctggctccgccattcccgggccccccagggctcgggtcccagctccccaggctcgctctctgcgccccgctccccaagcagaggggaagaccaggaggaggaggaggaggaggaaggggacggcagcccaggctccggccctatcctgccccccgcctccccggtggagtgcctcatctgcgtgtcgtccttcgacggcgtgttcaagctgcccaagcgcctggactgcggccacgtcttctgtctcgagtgcctggcgcgcctatcgttggccacggcgggcggcggcaacgcggtggcctgtccggtgtgccgcgcgcccacgcgcctggccccccgccgcggactccccgcgttgcccacgcagtccggtctcctgccccgcgacgcgcgcgcaccgccctctcgccagggctccgtgcgcttcgaccggcgccgcggccttctctacctgcggccgccgccgcccccgcccgggccgcgcaaggcccgcgccccgccgcccccgccgcctctgcgcctgggccgcccgctgtcgcgccgcttgtcgctggccagcccggcctgggtcttcaacgctgccgtggcgctggcggtgctggtggccgcgggcctcgtggtctcgggcgtctacatcttcttcctcatcccgcacgccacctcctccggccccccgcggccccagctcgtggcgctcgctccagcgcctggcttctcttggtttccgccgaggcccccgccggggtcgccctgggcccccgcctggacgccgcgccccacgggccctgacctggacacggccctgccaggaactgcagaagatgcgctggagcccgaggcgggccccgaggacccggcggaggccgagaggacgctggacaggcgatcggatggcacgtggggcacagaggctggccccggctgggccccgtggccacggggcgcgaggaggctgtggggctcacaataagtgcgccagtactgcagtcctgcctccaggcctggcacctccgtgttatctggggcccttagtagggcgcgcagcacttacctgtttctccagattggggcttagggcaagcatccttggcattgtcaccatggggctggaccctctcaaggagcaggcaccgcagtcgtcccacaaggatcctctgggaacacccctgacccccattcttgtggctgtccagcggagggtgccctgaccgtgacctctataagggtcctgctggggcttgctcctgctccgcaacccctactccgtgggggtgcagttggaagcatccctgatcctcatcccttgtaggagtccagctgtggacgcccccgactgacatccatgcaggtgcccagccaggggcagccccacacggatccttgaacgggtcttgctgggagtgcccccagtcatcctcaccacagattcctgggggagcgtccttgccagcactggaggccaaagcactcatccttcggattggccataggttgcaggggcccgcctatctttggagggcagagctgctgctgctattcttccttggtcacctcctccccaactggctcattgcaggggacgtcccaccactccacccatctgtggagtttgttttctactgcctgcaggctgggcctgggtgggctccagctgtctacatgctggtcccgggtgtagagttgccatcctgtacacctggttggggctggggctcaggcttgaagtaacagggtgtcctggccagggctggggaggaacttgagccttaaagactggctcccgccccaatcctaagtcccaaactgctctgggagcctccacttccccctgggtcgtggcttctaggatcctcccaatatgctgtggtgcagctgtgcttatcatggctcagaggccaacatcaccccaggggtcagacagaggcagacaatggtgggggtgggagtcctggacctccttggttagccagagggatcctagtccctttccctggccaccagagtccccatcacccccgattaatatcttgatgccagttactgcacttcttcctccagggctccatctgtcctgcccagcctcctttcttgtacctcgaggtgaaccctgagccttcccaatagacagcagcctccagggaaggtggcatatgggctcctgtcctcttcctcccagaagtcttcctgggttagttatgggggtagatggcagctattctctgtgcagactgaacctggggcttctgtttcctcccaggccctgcacaccacccccccaatcctgcctcacctcactctgggatggagtgctgtgttttgggaatgggcacccagcatgttccaaagcgaaacgtgacttctatgtggctggaggctcctgtttgatttgttaacgtgtgtcctcagcaccagcatacagtaggtgccaaacaagggagtgacagaattgcaggtgacccaggcagcctgggaatgcaccctgggcccaggactgtctagagctagctctggtgtgagctgctgcttccaggtgggagccagaggaggaacactagggagtccacagtgtgtcttcccagaccagttcttgcccacacccacatgccgatgtcacccacaggggctgggaccagtgtactgggtcactgggcagccacagcccagcctcatagggaagaaacctggtcagacagccgcagagttggtggtctattcattttctgtggctgctgtgacaaaatacccccaacttaattatttagaacacgcgtttattttttttaatttatttttgaaacagagtctcactctgtcgcccgagctggagtggagtggtatgatctcggcttactgcaacctccgcttcccgggttcaagcgattctcctgccttaggctcccaagtagctgggattacaggcgcccgccaccatgcctggctaatttttgtatttttagtagagacggggtttcaccatgttggccaggctgatctcaaactcccggcctcgtgatttgcctgccttgccctcccaaagtgctgggattacaggcctgagccaccgcagccggccttatttcatttatttatttatttttttgagacagagtctcgctctgtagcccaggctagagtgcagtggcgcaacctcggttcactgcaacctctgcctcctaggttcaaatcattctcctgcctcagtctcccaagtagctgatattacaggcgcccgccaccacacccggctttttgtatttgtaatagagacggggtttcaccatgttggccaggctggtcttgaactcttggtctcaagtaatctacccacctcagcctcccaaagtgctgggattacaggcatgggccaccatgcctggctaaacacacacttcttatcttgcagttctgcagtccagaagtcaacgatcagtttcactgggctaaagttgagttgcccatagggctagttctttctagaggctctaagagagaattcatttcattagtttttccagcttctagggctgcattccttggctcctggctccttcaaagccagcagtgcagcatcttcagatctctctgaccctcctacctccctctttcacttataaggacactacaagtacatagcgcccacccgaataatccaagatagtctccccatctcatgatcattaatttaatcacacctgcaaagtccattttgtggtgtcaggtaaaagattcacaagttccagggattcagaccgggatatctttggaggccattattctgcctaccatagggtctcagagatcctcctcattgcttccctctcccacccaacctaggggagtgggggtgtgcaatggtatttctgacccagacaggccaagcaggggagtcagaaaggggcccttgcctggtgttgcacagaagagggagaggatgttctgtgcctgagggtagaccaggaaggctgcctggaggagggagctgtatcctaaaggatgctcaggagctggcattgaggccagtggcatagcctgcacaaatacaggaggacctggggaggccaggggtggggctgggggtattgggtggggctggccgcattctccgtcttaaccagctcgctcctaggtgcttttgtggcttctgcactctaccagcttggagccaggggcctcattctctcttgcagtaaaatgaggctgatgactgagcctaggagttgctgggcatctggtctgctgattaccaccttggtgcccaatgtctgcctgcctatccactgctttcaaacaaagaggctgcctgacaccacccagggggacgcctcccacccttgcccagcctcagccaatctcctctttctcttcttcagagctggagttgtgccctcctatcctctctctgcccaccccatcactgctgtacaccctgccccttggcacttcggccccggacttgctcctcctggcaggcctgggtgcttgtgaagccgggtgccagagggcccagcacggcacggcctttgattctgttttctgtaaatcgacgacaataaattctctttttccttcatccacaagtgtttactgagcgccttctgtgtaccaggccgcaccagggtgcggagcaaagaccaacctcagggagcagatgaggtccaggcggctgaaccaaccgaaccatggttctggtagcactgcctcccccgccaccctcagggggccctgctccccaagcccttcccaaatcctgccgtccagctctcctccccaccttgcaggagggacgccagggcccggttttcgggttccgccattctttcctcaatgagggtcggagaggtccctgcccacgccagacccgtccccggccgtcgcggcaccctcttgtgatcaggcggagggaccaagggccaagagcggggcttcgccggacgctgggagcgtcactgtccagactgacagatggggaaactgaggctgaccagctgggcagggcgtgcatacgaatctgggtcctggaagcgttctgcaagatcccttctcacctcaaccgcacgtgctggcatccttgggtttccctccttccccagatcacagccgcacttctctcctccgccctcatagtcacggccctgccttctccctcctcttgccccgggcgggccccgcccagaatgcggagaggccttcgaggaagcgcggaccaatcggaggccctatgtagggctgaagaggcgggactctggtcgccataacaactcatcacgcctgtgctgcgcgcgcgcgtcgccttagtgccgcagccctattacgtgaggtagggaaggcgcgccagactcgacggccaatcagggacccgagggcgatgttgccatgacgaccacgttgcgctggagattgcgacgggggctgaaaccgcggggaactcggggagcgagtggtgagaacagtgagcaccagcactccgatggcgctggcgagaggaaaggctgcggcgcgcagagcgaggctgcgggaccccaggatgggggacaggaggctgcggggcctcaggtgagcagcaagcgagagaccagtcccttcgagcgccctcacgcgttttgtccccacgccacgccggggacgagtctgtggcacagactcgtccccggccccgcgggcttaagttgtctgggggctgtcgctttgagtacagatcatatagttatgaatacattttaacgcagatccaaacacatagtataacgtgaggatcctatataaagtgagactcctcaaaaaaaaaaaaaaaaaaagatttttttttttttttagccggacgtggtggcgggcgcctgtagtcccaaccactcgggaggctgaggcaggagaatcgcttgaagccgggaggcggaggcttcagtgagccgaaatcgcgccactgcactccagcccgggcgacagagcgagagactccgtttgggggggtaaagtgtttttttaaatgcagtcaaattcgaacgtaggttgataggatcacatagttgatccactctaaccccacacccacttgcagacctggttagtgctgaggtcctctcatcccagggagtaggctagagttcgcactggctcccctggggcccggcttggcgtggcaaagctgggagtctcgccctaggttggggtttcctctgctctgtaagcctctgcagaaggagcagagggtggtgggagaagaagtgcccaagaggggccacaagctacctgtgatctgtgtccccccaccagggggatgggtgctttcatttttatcgttgtggaaaatttcacattaagtacttctccaaagaatctcccagacatctacttgttctttcaaaacataacagatttttttaaaaaacaatttacataccatataatttgcccattttgagtgtacaattcaaggctgggcgcggtggctcacgcctgtaatcccaccactttgggaggctgaggtgggcggatcacctgaggtcaggagttcgagaccagcctgaccaacatggagaaaccccatctgtactaaaaatacaaaattagctgggcgtggtggcacatgcctgttatcccagctcctcgggaggctgacaggcaggagaatcgcttgaactcgggaggcggaggttgcggcgagccgagattgcaccattgcactccagcctgggcaacaagagcgaaactgcgtctcaaaaaaaaaaaaaaaaaaaaaaaaaggccgtaggtctgaatagacccctcacctaagaaaaatagatacatagctggcaaataggcacatgaaaatatgctccacatcatatgccattagggaactgcaaattgaaacaataatgagatactactatacatctattagaatggctacaatgcaaaacactgatagcaccatatgctagcaaggttgtgaggcaatgggaactctcgtttactgctgatagaaaggcaaaatggtatagccactttggaagacagtttggcagtttcttacagaaagttaaatatagtcttaccatatgatacagcaatcacactcctgggtatttgcacaaatgagttgagaacttatgtccatgcgaaaaccacacaaattattatagcagctttattcataattgctcaaaacttgaatcaacccagatgtccttcaatagataaatggctaatctgtgttacatccacacaatggaatatcattcagcaataaaattaactgtgctaccaagttatgaaaggcatggaggagtctgaaatgcacattggtaagtgacagaagccagactgaaaaagctacatactgtatgattacaagtttatgacattctggaaaaggtaaagctatagagacagtaaagcagtgactgccagggactcagtgggagggagggagggagggagggaggaatgaatagtagcacaagtaatttttgggggcagtaaaagtattttgtactatattgtaatggtggatacatgaatttatgcatttgtgaaaacccatataatgtacattaataataatgtactaatattcattttacaatgttaacaaatgggccgggtgcggtagctcatgcctgtaatcccagcattttgggaggctgagcggggcggatcacgaggtcaggagatggagaccatcctggccaaaatggtgaaaccccaactctactaaaaatacaaaaattagccgggtgtggtggcacgcgcttgtcgtcccagctattcgtgaggctgagacagaattgcttgaacccgggaggcggaggttactgtgagatcgtggcactgcactccagcctgggtgtcagagcaactccgtctcaaaaaaaaaaaaaaaaaagaagaaactaaaatgaggtccaatgaagtagtgccaggaaaaacataaatgaactaactattaagcccaggaaaggtaagtggttaagagagaactttggtctgagacttcctggaatcaaactgtagcactgcctcccactggctttatgactcagggcaaatacttagcctatgggagactcaggccctggaccctctactcctctgctccacccgtgggagagatcaggcccatctcacagaggaacagattttttttttttcttttttttttattgatcattcttgggtgtttctcgtagagggggatttggcagggtcacaggacaataggggagggaaggtcagcagataaacaagtgaacaaaggtctctggttttcctaggcagaggaccctgcggccttccgcagtgtttgtgtccctgggtacttgagattagggagtggtgatgactcttaaggagcatgctgccttcaagcatctgtttaacaaagcacatcttgcaccgcccttaatccattcaaccctgagtggatacagcacatgtttcagagagcacagggttgggggtaaggtcacagatcaacaggatcccaaggcagaagaatttttcttagtacagaacaaaatgaaaagtctcccacgtctacctctttctacacagacacggcaaccatccgatttctcaatcttttccccatctttcccccctttctattccacaaaaccgccattgtcatcatggcccgttctcaacgagctgttgggtacacctcccagatggggtggtggccgggcagaggggctcctcatttcccagtaggggcggccgggcagaggcgcccctcacctcccggacagggcggctcgccaggcggggggctgacccccccccccacctccctcctggacggggcggctggccaggcagaggggctcctcacttcccagtaggggcggccgggcagaggcgcccctcacctcccggacggggtggctggccaggcggggggctgacccccccacctccctcccggacagggcggctggcagggcggggggctgacccccccacctccctcccagatggggcggctggccgggcagaggggctcctcacttcccagtaggggcggccgggcagaggcgccccgcacctcccggacggggcggctggccgggcagggggctgacccccccacctccctcccggacgggtcggctggccgcgcggggggctgacccccccacctcccttccggacagggcggctggccgggcggggggctgacccccccacctccctcccggacggagcggctggccgggcagaagggctcctcacttcccagtaggggcggccgggcagaggcgcccctcatctcccggacagggcggctggccgggtgggggactgatccccccacctccctcccggacggggcggctggccgggcggggggctgacccccccacctccctcccggacgaggtggctgctgggcggagaggctcctcacttctcagacggggcggctgccgggcggagatgctcctcacttcccagacggggtggctgctgggcggaggggctcctcacttctcagacggggcggctgccgggcggaggggctcctcacttctcagacggggcagttgccaggcagagggtctcctcacttctcagacggggcggccgggcagagacgctcctcacatcccggacggggcggcagggcagagatgctccccacatctcagacgatgggcggccgggcagagacgctcctcacttcccagatgtgatggcggccgggaagaggcgctcctcacttcctagatgggatggcggccgggcagagacgctcctcactttccagactgggcagccaggcagaggggctcctcacatcccagatgatgggcggccaggcggagacgctcctcacttcccagacggggtggccgccgggcagaggctgcaatctcggcactttgggaggccaaggcgggttgctgggaggtggaggttgtagcgagccgagatcacgccactgcactccagcctggacaccattgagcactgaatgaacgagactccgtctgcaatcccggcacctcgggaggccgaggctggcggatcactcgtggttaggagctggagaccagcccggccaacacagcgaaaccccgtctccaccaaaaaaaatacgaaaaccagtcaggcgtggcggcacgcgcctgcaatcgcaggcactcggcaggctgaggcaagagaatcaggcagggaggttgcagtgagccgagatggcagcagtaccgtccagcttcggctcggcatcagagggagaccgtggaaagagcggggggggggggagggggagggggaggagggaagaggaacagattttcaagaacgatttgaggatatgtattagcccaggacatgttatgggatgaccagtgtcttcaaactaggcagaaagaggggacagggtacaggagtcaggggaagtaggcgaaaaggtggactgtttagtaggggatcaggaacatagaaaagtggcaaggctagtgaccttggtacccagacaccaggggtataactcaggtaccaggtgtgagaacagctcaattccagggatacttccatccccagcttgcaatctccatggctgagcctctttgataacttttgtgctattcctggtttcaagtctacctggtccatcaatcagtgctcttgtctgcactccagttgggggaactcatgaactgtaaagggcaatcctgtgggggaatgaacaggttggtcagtccagcctagggcagactgacccaccatgacagtccaggggtactgatgacaggcatgtaccatgagcttgggggtgtcccacctgtgtctccactggagagaatacacaggtgtcactgaggaacagggttgcaaggactgaggatatggggtcagctgaggacatgttaaggagaggcaaacattgcacagctaggcactaaggagagagaaagggacacagcggggcatggccagaaaactggaattgagctgagtggaggcaccaagacctgcgagggcacaggctgggcaccaggtgtgagaacagcccactcctgggggcattcaccaggggtagatctcttcagggtccctctgccacaactagttttgagttcatatggtccacctgctggtgggaatgtagaagccttcagacctatgaaggatgatgagtttttgagagtccaggccaggagaggccaaaacaccatgaccccagcaagcgagaataatccttactccaagacaaacacagacctgcaaaaaatgaacattcagggaaggctcccaggcaggacccagtgggcccacacgcacccatgtcagtgcatgcagtgcctggaatcttacaggaagtgaccgagctgaacgtgaccagctgtgaagattcagagacttctgagccccgatcttggccactcacggcccttgggtagaatgtgtggggtgtccactcagccacttgttagaggaggtggcatgatctgggcctcagtgccacgaccaacagcgacttccaaggggaacatggaaagaacagaggaaaaaaaccagagttgaggctggggagagttatggtgccagtggtctcacccagcactgagtgcaaagttctccagcaccacttcaggtagaagctcctctggaccttgcctaagaactccgttcgtccgggaggacgcaggcccacctgctctaacatgaacgcgtctgaattcagcggaggacacccaggagcccggttattctcctgccagcgtcctcccctgatgtgtccctgaccccgtgctctgacgtactcagccatgtactcactctcctctcccaggcccccatacctgagatcaccatggcctgatatggggtagactacaagcctaccgtgcctcagccatgtgcagggcgacctgtccctggcatccacacctgtggcccatacgtcgcccgcattgtggggcgccgaaaacccaacacaactgaaacacaactgctgaccttccccctaagccgcctctaaacgaggtccctcggcccctggtcccagccgctctttgaagacttgcctgatgacaggcatgtaccatgtttttggctgggacatttttctgagccttgctccgggctccgtaaagcggacacggtgccagggagagaatttcggggcggttgcgggcacaggcgggcttctgcggaggccctggcgaacgcccccgcgcggcgcggtccgatggccccatggggccgcccctccactgtgaggtcaccggggttcagcaacattcactgcggctaggacgcgtacaggtcactgaggcagaacttcccgattctcgcgccttcgttcgtttctgcggaccagcggagactcctccacaccgcccaccgcccaatgatcccactgccgcaaaccgccccaaagccagcgccgaaagccgacgccggaagccccgccccacgcagggcccgcccgaacgttcccgttcctgggccgccattggccaagtctgaacggccccacgtcgaggctccttatgggaaatgtagttcacgtcccgcttcaggagctagcggcgccctcccttatcgccttggcaacgacccagccgcgccgcgaggagagccgggaatggaggtcgtggcgtgaggggcgccgagcgaggggaggcgcgggccacgggagttccgggagttccggcgttgcccggcagtccgcagtcctcggcgggaaggctgtcccggcgcctcaggcagctctgcgtgggccggggtgacttcctcgcgatcccctgcgcgaggtgaagggcagggacctttgccgcgccttccacgcgccgtgccccaccggcgagtggctccatcttcctcagacttatcgctcgcggacaggcgccgtgggtctcccgggcctccgtaccgtcctccttcccagcggctccgggaagcggttccctgtcttcggacgcatttcacccgcgcggggagagcttcccgggaaggttccacggcggccgagggtttccgcgcccgggacgcgtttcggctgaggccgtgggtccagtccacgggttctgcccgcacggtccaatggccggggaggcggaggtgagcagaggatgcctccgaggaatgagggggcccaccaggtggggggcggcgtgtgccagggcagagttggaggagggcaggagatctgcgtatgattccagggggaggtctttgatgcacggctggggcatgcccttggcagtgggagccattggagatgtgccgcaggactgggacaggatggggtcgtagttgctgtgccaggccctctggagacgcatgtgcagaacggcgtgtggaaggccaggcaattgcctatagggtaaactggggacgttgtgctgggggtgtacagttttaggcattctgttgtccagttttgtgcctgttgagcaggaggcaaactggaccctgggaccaggtacttgagacctaagggagaaggatgagcataggtttggttgcgtctgagaggtatgatctctgggactggaattggcaggcaggagatagagtggagcctgtgcccttggccctgcacatagatggcatcagtctggtcaccaacctgatgtcgctttgggctggacacagtttccagtagtaacaccagaagcatcaataacaccagcagctctgatattcctctgggataggagaaggaaggtataagggtatgtgtagggagtaaggtggggaagagtttagagctcatagggaaagataatgtcagggggagatgtgataggaccctgagatacaggtcaagggcctgaatgtgtccatctgtccatattttggttgtttttttctgcccatcattgaccccaaggctcagttggacccatcattgcagggcttggtgatgtttgaggatgtgacggtatatttctccagggaggagtgggggctccttaatgtgacccagaagggcctataccgggatgtgatgctggagaactttgcactcgttagctcactgggtaagtctcttacactgtcccccagcacactgactaccccctcattttccccatgcgaagttctgtccataacgaagccagaccatgggggctctttccttcccagattccctgttgtaggtattgtgggtggtgggactcggtggtgggactcggcggtgtgctctttccctgcctttctctgagcaatgctgttggcagcctcaacacctcttgccccaggagctagtggagcaggttttgggggtcagatgtttcatagtttgcccaccaaatcccaccaagctctgccttttcctggccatgtgactctcttgaagacatggcttctctgtgctctgggttttgcctccctacaaaagaaattttacagggacctccctgggccaggcttgagccatgaattttaatcagaacggtttgggaaatatatatatatatatatatatatatatatatatatatatgtgtatatatatatgtatatatatgtatatatatgtatatatatgtatatatatgtgtatatatgtgtatatatgtgtatatatatgtgtatatatgtgtatatatgtatatatgtgtatatatatgtatatatgtatatatatatgtatatatgtgtatatatatatgtatatatatatatgtgtgtatatatatatatatatgtatatatatatataatttttttttttttttttttttttttttttttgagacagagcctcactctgttgcccaggctggagtgcagtggcgcaatctcggctcaccacaacctctgcctccagggttcaagcgattctcctgcctcagtctcccgagtagctgggactacaggctcgcgccaccatgcctggctaatttttgtatttttagtagagacagggtttcactttgttggccaggctggtcttgaactccggacctcatgatctgcctgccttggcctctcaaagtgctgggattacaggcgtgagccactgcgcctggccacaaaggtacttctttcgttaaatttattcctaagtactttattcttcactgttaagtatggtgttagctgttggttttttgcagatgcccatttcaggtgaggaagttcccttctctttctagttcatttaatgtgtttattaagaaaagtcatggccaggtgcagtggctcatgcctgtaatttcagcattttgggagggcgaggcaggtggattacctgaggtcaggagttcaagaccagcgtggtcaacatggtgaaaccccatctctactaaaaatagaaaactagccaggtgtggtggcacatgcctgtaatcccagctactagggaagctgaggcaggagaatcgcttgaacctgggaggtggaggttgcagtgagctgagatcgcaccattgcactccagcctgggcaacaagagtgaaactacgtctcaaaaaaaaaaaagaaaagaaaggtcactagattttgtcaaatgcttttccaatgtctaatgaaatgatcatgtgatttttgtcctctcttctgttaatgtagtatattagaataattgattgccttttctttttttgagacggagtcttgttctgtcgccaggctggagtgcagtggcgcgatctcggctcactgcaacctccacctcccgggttcaagtgattttcctgcctcagcctcccaagtagctgggactataggcgtgcaccaccacgcccagctaatttttgtatttttcgtagagatggggtttcaccatgtttgcaaggatggtcttgatctcttgacctcgtgatctgcccccgtcggcctcccaacactaattgttgattttcatatgttcaaccttgcattactgggataaattccctgtcatggcttataatacttgtttttttttttttttttttttttagacagagtcttactctgtcgcccaggctggagttcagtggcatgatctcggctcattgcaacctccacctcttgggttcaagtgattctcctgcccccgcctcctgagtagctgggttacaggcatgcaccactatgcctggctaatttttttatttttagtagagacaggggtttcaccatgttggccagggtggtctttttttttttttttttttttgagacggagtctcgctctgtcgcccaggccggactgcggactgcagtggcgcaatctcgactcactgcaagctccgcttcccgggttcacgccattctcctgcctcagcctcccgagtagctgggactacaggcgcccgccaccgcgcccggctaattttttgtatttttagtagagacggggtttcaccttgttagccaggatggtctcaatctcctgacctcatgatccactcgcctcggcctcccaaagtgctgggattacaggcgtgagccaccacgcccggcctggccagggtggtcttgaactcccgacctcaggtgatccacccatctcggcctccaaagtgctgagattacaggtgtgagccaccacacccagccagtggtgtagttttcttataatgtctctgtattgagtatgagggtaattttggcctcaatggatgagttgggaatgtttccttctcttctgttttctggaagagtttcttaagtattggtgttaattcttatttcagtattgttagtattcacctttgaagccatcagggcttggggttgtgtgtgttttggggggaatgttttttaataacaacaagaaaaccctctttgttacatttgtatttagattttctgtttcttcttgactcagttttgatagtttgtgtctacttgggaatttgtccatttcatctaagttatccaatttgttggcatacatttgtacatagtatttcattattttttaatttttataaggttactagtgatgtcctttttccattcctgttcaaagtagtattgagtcttctctctgttttttgtcactctaggtaaacatttgccaattttgttgattttttcaaagaaccaaattttggtttgtcggttctctttttctaatctgtttcattcgtttctgctctaatttttattatttccctccttttgctatctttgggtttgtttttctttttcttgttccttgaggtataaagttaggttattggtttgagatcttttaaaatatgggtatttatagccataatgttcctgctaagctctgcattttctgcatcccataattttttgtttgttgtggtatttttttctttttctttttctttttttttaatttttctttttgagatggagtcctgttgcccacgctggaatgcaatggtgcgatctcggctcaatgcaatctccacctcctgggttcaagcaattctgctgcctcagcctcccaagtcgctgggattacaggcatgtgccaccatgcctggctaatttttttttttttttgaggtggagtctgatgcctcccaggctggagtgcagtggtgcgatcttggctcactgcaacctccgccccccaagttcaagcgattctcctgcctcagcctcccgagtggcatggtccaccacacctggctaatttttgtattttttttttttggtagagacagggtttcgccatgttggccaggctggtcttgaactccagaccacaggtgatccacccacctcagcctaccaaagtgctgggattacaggcgtgagccaccacccggcctgttgtatttttcttttcttttctttttttctttttttgagatggagtcttgctctgtcacccaggctggagtgcagtggcactatctcggctcactgcaagctccgcctcctggattcatgccattctcctgcctcagcctcccgagtatctgggattacaggcgcccaccaccacgcctggctaatttttttttgtatttttagtagagacggggcttcactgtgttcggcaggatggtctcaaactcctgaccttgtgatccacctgcctcggcctcccaaagtgctgggattacacttgagccaccacacccagccctgtgtttttattttcattcctcccaaagtacttgtaattgtcatgtgatttattttttctttgactctggatttttaggaatgttttgtttaaattccttaaatttgtgagtttcctaaatttctttctgttgttgatttctgttttaattcatttgtggacagagaacatacttgacattatttcaatcctttgaaatctactgaggcttgctttatttatttatttatttattttgagacagagtcttgctctgtcgcccaggctggagtgcagtggcgcgatctcagctcactgcaagctctgcctcctgggttcacgccattctcctgcctcagcctcctgagtagctgggactacaggcgcctgccaccatgcccgggtaattttttttttgtatttttagtagagatggggtttcactgtgttagccaggatggtcttgatctcctgacctcatgatctgcccgtctcggcctcccaaagtgctgggattacaggcatgagccaccgcgcccagccgaggcttattttatatcctagcaaatggtatgttctgaagaccgttccatgtgcacgtgacaatgtatatcctgctgttgttaggtggcaagctctatagatgtctgttaggactagttggttttcattgttgttcaagtctgctgttgttattgatggtgggaaattacaatcgttattattgctgaacagtctgtttcttcagttatgtcagttttgcttcatagaaaggcttttttttttctttttgtttgtttgtttgtgtttttgagacagagtctcgcactgtcgcccaggctggagtgcagtggtgtgatctcagctcactgcaagctctgcctcccaggttcatgccattctcctgcctaagcctcccgagtagctgggactacaggtgcccgtcaccacatccgcctgatttttttgtatttttagtagaaggggggtttcaccgtgttagccaggatagtcttgatctcctgacctcgtgatccgcccaccttggcctcccaaagtgctgggattacaggcgtgagccactgcgcccggcctgtttgtttgtttttgagacagggtctcactctgttgcccaggctagagtccaatggtgtgatcgtgactcactgacgctttgacctcctaggctcaagtgatcctctcactatggcctccctagtaactgggactacaggtggtgcatgccatcatgcctggctaattaaaataatatattttttgtagagttggggtcttactgtgttgcccaggctggttgcgaacgtctgggtttaagtgatctcctacctcactttccaaagtgctgggattacaggcatcagccaccatgcccagcctgtttcttttactacctgtcacccgcaggacttgcaccttcgagatcccctgtgtttacccagctggaggatgatgaacagtcgtgggtgcccagctgggtggatgtgactccagtcagcagagcagaagccaggagaggttttggtcttggtaagtggagtggaggggaataccttggtttcagcagtgggctcacagaatgctgagtacctgcatacaccgataccttggtgttgagggcagtgaccataccttatttccttccacctttcctgtcttatgtggacactgtgcagtctgccatctctaccatgattttcaggccccgcatgttcctgcctctctggcctgcgtctcctcattgcccttctctgtatctgtgcagagctgtctactgttggcgactcagtgcgtgtcttgaaatgtgcacatatccttaaacaggtatttgaacttcagccaatccttaattaatacttaaacaccagctactattttggaatcacattttgctgggactagacacatgcctcctcatagtgcttggctgtcaccagcagccaaggccctgctgaaaccctttgcagaggagtgacttggagaccccacctctcttccctgcaccatatcctatcttgtgccctcatctcagttgaggttttccttagtctgtagtctggtggagccatattcagttgtgccaggctttcccaacccagacctttcctagcaacctctcagcaattcttttttttttaagatggagttttgctcttattgcccaggctggagtgcagtggcgcaatctcagctcactgcaacctctgcctcctgggttcatgccattctcctgcctcagcctcttgagtagctgggactacaggcgcctgccaccatgcctggctaatttttttttttttttttgagtcggagttttgctcttactgcccaggctggagtgcagtggcgcgatctcagctcactgcagcctctgcctctggattcaagtgatcctcctgcctcagcctcccgagtagctgggattacaggcatgcatcaccacacccggctaattttgtatttttagaagagatggggtttcgtcgtgttggtcaggctggtctcgaactcctgacctcacgtgatctgcccgccttggcctcccaaagcactgggattacaggcgtgagccaccacgcctggccctttcagcagttctatggagtccttctgggtgtgtctgacatgcactggtgattaaggtacctcctccctctagttcaactcttagtaatgattcatctctgctttcagatggtttgtgtagagtggaggatgagagagcccatcctgagcatctaaagagctacagagtcatccagcaccaggacactcatagtgaggggaaaccaagaaggcacactgagcatggggcagctttcccacctggttccagttgtgggcaacagcaagaagtccatgtggcagagaagctgttcaaatgcagtgactgtgggaaggtgttcttaaaggcctttgccctccttgaccatctgataacgcattctgaagagagacccttcagatgcccaacaggcagaagtgctttcaagaagtcagctcatattaacccccgaaaaattcacactggagaaacagcccatgtgtgtaatgaatgtgggaaggccttcagttacccgtctaagctgaggaaacaccagaaggttcacacaggcataaaaccttttaagtgtagtgactgtggtaaaaccttcaaccgcaaagacgcacttgttctacaccagaggattcacactggagaaaggccttacgagtgcagcaaatgtggtaaaaccttcagtgttctgtctaccctcattcggcaccggaaagtgcacattggagaaaggccctatgagtgtacagaatgtgggaagttctttaaatacaataatagcttcattcttcaccagagagttcacactggagaaaggccttttgaatgcaagcaatgtgggaaaggctacgtgacccgttcaggcctctatcagcactggaaagtccacactggggaacggccctatgaatgtagcctgtgtgggaaaaccttcactaccagatcctaccgcaatcggcaccagcagttccacactgaagagaggtcttatgaatgtacagagtgtgggaaggccttcaaacatagttccaccctccttcagcacaagaaagtccatactccagaaaggcgtcaggaggacagggcacatgggaaggtcgttagctgctagcaccgtgttcatcaggaaaggtcttattccagaaaggaggttaaggagagtggccgtgagagtgccatccgaaagaagctaaaccttgcacatcccaacacccaccccagggagagttcccgtgtgtgcctggtgtgtgggacgctttcgggagccacattgcactctgacttgcctggggctgttggcagtgtcacatcactgagtttatccaccgccatccacctctatccaccccataaggtccctacagcaagtgggacagcagaccttgtgctccttgctctaaacagtagagaatcgttaatagtggagcccaaaacaggcctcattccctacccttgactggtttagctgtggacatgacccacctctggccggaggagctgagctggtatctgctgggggcttcctgggaaggtttaccattttcatggaaatggttgacattacacatggtatttgtcatgccctagcatggactgtctcatactgctctggactatgtggtaataaaggctttattgtttaagccgcttaaaattttttttttattttttttttgagatggtcttattctgttgcccaggctggaatgcagtggtgccatcatagctcaccacagccttgaactgctggtctcaagggatcttcctgcttcagcctcctgagtagctggcactacaggtgtgcgccatcacacctggctaatttttttttttcatttgtggacagggtcttgctatattgcccaagctggtctcgaactctgagcctcaagctatcctcctgccttggcctcccaaagtgctgggagccactgtgcctggcctagtttttttagagacagggtctcacagtcttgcccaggctggagtgcagtagtgtgaagctagctcattgcagacttgaactactggactcaagtgatcctcctgcttcagcgtattgaatagctaggattgtacttgtgtggcaccacatctgactaattttaaaaatttgtatagagacaggatcttgctacattgcccaggctggtcatgaactctttgcctcaagcagtcctcttgcctcagccttccaaagtgctggtattatagttgtgagccactgtgccctgccaagtctcttttaatattgaggttctgatccctgtgtgtggagagattgagaatagaatccggcactatcaccgtaagttgagggaatggcttttgtggaggtggtctcttgagttttttctgcctcagtggggatggcaggatgacagaaaatacctctagtcaaggttggcctaatttgtattggcccctgagtcctccagggaaagacttgtagcctggatgtcaggcttttttgtgggtccagagctcaccttgcggaagggaatagttggtgagagatcttctatatgtttatggacataaaaagttgggttccttgttcccagggaatgttccagaacttccagcattggtcagaaggagctgtttccagattcagctcaaaagtcatattctccaaaatctggaacatggaggtaagttatagactgactctaagacctataggggcctgttgggtagagtaatttgagtagagtaagtgggcatagaaatattgagtgaagtagtatggagtgaagtgtctgataaacaagaggatttcagccagttctaaagaggcatccacaaatgttccagcaactgaggtttcctggggtgagggcaccagaacttctcagcaattgcagacctgttatttgtgtcaaggtcactgtcagcaaataatctacagactttctggattctcatatcctctctgggctgttcacctctcatggccattatcctgagactgaaagattctatagtcctgggatgtgccttttgtgacccagccagtactcctggtgtctggatgctgtggcctttgcagttgtcaagtttttgctgtcatggtgtcagggctttccctctggggctcaagagagacacgtagggtaaccaaagtatggatccagatcttgcggtttatgggaccttttcagagtcttgctgtgtcacgcagcctggagtgtagtggtatgatcacggctcactgcacccttgactccagggattcaagtgatccttctacctcagcctcctgagtagcagcgactacagttacacaccaccacactcagctaattaaagaaaaaatcgttttaggctgggcgtggtggtcgatgcatgtaatcctagcactttgggaggccaaggtgggcagatcactttaggtcaggagtttgaaaccagcctggccaacatggtgaaactccacctctactaaaaatacaaaaaaattggctgggtgcagtggctcacgcctgtaatcccagcactttgggaggccgaggcaggtggatcatgaggtcaggagatcgagaccattctggctaacatggtgaaaccccgtctctactaaaaatacaaaaaaattagcccggcatggtgacgggcgcctgtagtcccagctacttgggaggctgaggcaggagaattgcttgaactggggaggcagaggttgcagtgagccaagatctcaccactattctccagcctgggtgacaaagcaagactctgtctcaaaaaaaaaaaaaaatttgggagtagggggtcaggattggcggctcatgcctgtaatgccagcactctgggatactgaggtgggaggatcgcttgagccgagaagttcatagaccagcctgggcaacatggcaagaccccatctctttaaattttttttttttttaagagacaaggttttgccatgtgcccaggctgatcttgaactcttgggctcaagtgatcttccagcctcagactcccaatgtgctggggttggtgtgacactgttcctggcttatacccacttttattttattttattttttttgagatggagtcactctgttgtccaggctggagtgcagtggtgtgatctcagcacactgcaacctccgcctcccagggtcaagtgattctcatacctcagtctcccgagtagctgggattataggcatcggccagcatgcccggctaatttgtatttttagtagagacggggtttcaccatgctggccaggctggtctcgaactcctgaccttgtgatctgcccacctcagcctttcaaagtgctgggattaccggcgtgagccaccgcacccagcctatatacccacttttaaagacatacgagatgctaaatgttattcagaatgggctagaaaatgggtggtaacttccagctgttgccatgctaaggggcagtaacttccgagtgttgccaaggcagtggcaaactgccatggcaatggcgggcctgtcttacggggaagtgctttcagcgccttttcctgatttcagcgtcttcaacctgctctggagtagagtcccatctgcctcctacctcagcttcacaaaaatcccttgaaggaggaattatcttcattttccattgctcccccacttccccagactggctgctggataggatattgatcaccttgctgcctatagaaatctcagtgctgcttttttagggggaacggaagccaatccacattgtaatttttttttcttttgagacggagtctccccgtcacccaggctggagtgcagtggtgcagtcttggctcccaggttcaagtgattctcctgcctcagcctcctgagtagctgggattaacaggttcgccgcaccatgcccggctaatttttgtatttttagtagagacagcgtttcaccatgttggtcgggctggtctcgaacccctgacctcgtgatccgcccacctcggcctcccaaagtgctgtgattacaggcgtgagccaccgtgcccagccatgtaattttaaaaatgtaatttataagagcataaaattatgaaatacttagaaataaatttgacaaaattatgcaagacttgtacactgaaaactacaaaatgttgctgagagactgattgaagaatacctaagtaaatgaggacatttaccatgttcatgaactggaagtctcaatattagtatgttaatcctcccaaagttgatttgcagattcaatgcagtcccaataaaaatgtcactaggttttgttgttgttgtttttgactcgctctgtaacccaggctggagtgcagtggtgcaatcttttctcactgcaacctccgcgtcccgggttcaagcgattcgcctgcctcagccccccaagtagctgggactacaggtgtgtgccaccacgcctggctaatttttgtatttttagtagagacagggtttgctatgttggctaggctggtctcaaactcctaacctcaagtaatctgcccctcttaccctcctaacatgctgggattacaggcatgagcagttgatcaaattcaacatcccgtcatggcagaaactctcaactaggcgtagaaggaacatacctcaacataataatggccatatatgacagacccacagctaacatcttactgaatggggaaaggctgaaagctttttctctcagaactggaacaagacaaagatgcccactttcaccactcctattcaacatagtactagatgtcctagccaggcaagagaaaagaaaaggtatccaaattggaggagactaagtaagttgttcctgtttgcagatgacatgatcttatatttagaaaaacctagaccccaccaaaaaaactcttaggtctgataaagagattcagcaaggtttcaggatacaatcaatgtacaaaaatcagtagtgtttctatacaccagtaatgatctagctgaaaaagaaatcaagaaggcaatcccatttatgatagttaccaaaatatacctgggaataaatttaaccaaggaggtgaaacacctctacaaggaaaattacagaacattgataatagaattgaagagacctttggattcatcctcacattcttcctcttctgcccacaaataacccccttccaaaaaaaaaatgatacaaacaaatggaaaaacatatgctcatggattaggagaattaatatattttgttttgtttttgtttgttttgagacagagtctcgctctgttgcccaggctggagtgcaatggcacgatctgggctcactacaagctccgcctcccgggttcacaccattcttctgcctcggccttcccagcagctgggactacaggtgcacgccactatgctcagctaattttttgtatttttagtagagacagggtttcaccgtgttagccaggatggtctcgatctcctgaccttgtgatctgcctgcctcggcctcccaaagtgctgggattacaagcgtgaaccaccacacccggctgttttttttgagacggagtcttgctctgtcgcccaggctggagtgcagtggcgcgatctcggctcactgcaagctctgcctcccggggttctcgccattctcctgcctcagcctccagagtagctgggactgttggcatgtgccaccacgcctggctaattttttgtatctttagtagagacaggttttcaccatgttggccaggctggtctcaaactcctgacctcgtgatctgcccagcttggcctcccaaagtgctgggattgcaggcatgagccactgcgcctggcagaagaattaatattgttaaaatgaccatactgcccaaagcaagctacagattcaatgcaatccctatgaagatatcaaatgcattttttccccacagaattagaaaaagttctcagagctttgtagaatcaaaaaagagcccaagtagccaaagcaatcctgagcacaaagagcaaagctggaagcatcacactacctgacttgaaaatatattacaaggctatagtgaccaaaagagtgtggtattggtataatagtcacatagaccacggaaacataatggagacccagaaataaatccagatatttacagccaactgattttcaacaaagatgccaataacatacattgggaaaggataccctcttcaataaatccaaaaactagatatccatatgaatgaaactagacccccatctctcaccgtatacaaaaacaactctaaataaagacttaaacatatgactcaaaactgtaaaactactagaaaaacaagggggtcggggcagtggctcacacctgtaatcccagcactttgggaggccgaggcggacggatcaccagaggtcaggagttcgagaccagcttgactcacatggtgaaaccccatctctactaaaaatacaaaaaaaaaaaaaattagccaggtgtggtggcgcatggctgtaatctcagctacttgggaggctaaggcaggagaatagcttgaacccaggaggcggaggttgcagtgagctgagatcgcaccattgcactccagcctgggcaacaagagtgaaactcagtctcaaaagaacaaaataaaacaaacaacaacaacaacaacaaaggaaaaggaaaagcacgtgttgggagaaaatatttgctaaatatattcgacatcttttatctcaaatatataaataacacttataactcgattataagttaataatcatccaaagtttaaaatgggcaaaagatctgaacaaatatgctttgaaagaagatatatggttatcaaatacacacttgaaaagttgttcaacgtcactagtcattcaggaaatgcaaatttaaactatgatgagatacaactactacacatttattagaatcgttaaaatgaaaaagacaaacatacaaatatatggcaagaatgtggagcaactagaactctcagtgagttctaatataagtgtgataaatttttttgaaaacagtttgacagttcttaaaatgttaaacataaaagccgggtatggtggagtgcacctgtagtcccagctacattgggcaggaggatcttttgagcccaagagtccaagtccagcctgggcaacatagccagaccctgtctcaaaataaaaacaaaaacaaaacaaaacaattaaacatacacctaccatatacccccaaaattccacttctaagtatctacccaagagaattcaaaggatatattaacacaaggacttgtacacaaatgtttatagcagcttcatttgagatagtcaaaagttagaaacaatttggccaggcactgtggctcatggctgtaatcccaccactttgggaggccgaggcgggtggatcatgaggtcaggagtttgaaaccagcattgccaacgtaatgaaacctgtctctactaaaaatacaaaaaaaatcagccaggcgtggcggtgcacacctgtagtcccagctactcaggaggctgaggcaggggaattgcttgaacccaggaggtggagcttgccgtgagccgaaattgcgccactgcactccagcctgggcgacagagccagactccatctcaaaaaaaaaaaaaagatggggtcttgctctattgcccaggctggtcttaaactccccggctcaagtgatcctcctgccttggcctaccaaagtgctgggattacaggcgtgagccatcacgcccgactgaacctcttttccttataaactatctagacttagatttttccttccttccttccttcctgtcttccttcttccttccttccttctttccttttttttttttttttagacagaattctgctcttgtggcccaggctggagtgcaatgccgtgatcttggctcattgcaacctctgcctgccgggttcaagcaactctcctacctcagcctcccgagtaactgggattacagccgccaccaccacgcctggctaattttttgtatttttaatagaaacgccgtttcaccatgttggccaggctggtctcaaactcccaacctcaggtgatctgcctgcctgggcctcccaaagtgctgggattacaggcatgagccaccatgcccagcctgagatatttctttatagtaacacaaaaacagcctaacaaaaaggtcacatagtaggtaggatttagtaagaaagagagctgagatttcaaggcaggtgaactgggtctaatgtttccactgctttactcacctctccctacctctagatttccaccctcccatgttgaaatctcttggttataaattttcacttgtgcttctttcttagatcaccttcttgaatcacagtggtgtctattttcatatccattgagggtatagtgattccttgagggttacaaggtctgcagatcgatgagttcttggcattttggagaggccagagactggtagctctgagtcattagttgtcaggccatgcctccccatcaaacaatcgaagcttggctgacttctctgagtgccagaagaaggctggggctgggggtagaggatctgggtttcacaagaggcgagtctggaaatgtcaaaattggggtccaaggtgagaggatggcgtggtaggacaacattgtctgccatccgtgtataatggctgaagctctggttagtgggtgtggcctaaggagaatgtagtgattcccactgtcggtgtaaagggcttcatattgatggagagttttctgtgttgtcagaagttctggtggacactgtgagacagatttcatggatttatagatgagacagctgaagcttgggagtctgtgccccagatcgcacaatttattagcagtaggagtccaagttgagccaagccagagaaggttactgagtgttttggcacccttggccttaatctgctgctcttcagatttcacagcccccatgttccagatagttcactcaaagcttgggagttggagatgagggaatcaacagatgctgacactagcatgaaggagaggtatagctgatctggaggtatgattgggagaggttgagaagcctttcaagggtgtccctgatgtgggagggcacaagcaaaggcccaggggcaaggaactgcccagtagattccagaagagaactaccattgcatacagcagagtgtacaataacagggtagtcagtacactgcatcaaggggctgaaggcaactgccttttggtttgagcatagtctgaaagcagtggagccactgaatcccacaaaagctggtaacctggacagctcaaaagtcacagccatcaggactttgcctggaatattctggcattattggcaaacatctatcttcccctaacaggttggctgctgtatactgagacccagtcggagatcagaaggcaggttcagtagaaacacgtaggactctactcatgtattaggaatcttttttttttccttttttatttttattttttattatttttttgagacggagtttcactcttgttgcccaggctggagtgcaatggcgtgatctcagctcactgcaacctctgcctcccaggctcaagcaattctcctgcctcctgagtagctgggattacacgcatgcgccaccatgcctggcttttttctttctttctttctttctttctttctttctttctttctttctttctttctctttcctttctttctttctttctttctttctttctttctttctttctttctttctttctttccttccttccttccttccttccttccttccttccttcctttcctttcccttccttccttccttccttccttccttccttccttccttcctttctttctttttctttctttctttctttctttcttttcttgtagagatgggatttctccatgttggtcaggctggtctcaaagtcccaacctcaggtgatccgcccgcattggcctcccaaagtgctgggattacatgcgtgagctaccgcgcccagccttttttttttcctgttttagagacaaggtctcattatgttgcccaggctggagtgcagtggtgcaaacatagctcactgcagtcttgaactcctgggatccagtgatcctcctgcctcaagtagctggaaacaggcatgccacaatcatgcccagcaccatcttatgagatctaatcttggccactcacacagaggattgagctctgatgacgtgtctaccctaactttatttgcttagaaggctgagccccatatggctcagctaacctttaattctgatcccacatgtgtcttacatattggagacattagcatcttccatattggagacattacactcaggaaggaaggcctgagtagggtaggtatcccccagacacctcactgtgctggggagtatttgagaagccctgctgtaaactttgctgacggcaaaactgttgtggcttctgctcacaatgtggttatcattgtccatcccctcaggggcttccaggagacgtggcagctgcagtggcctctgatccatcatacagtatggatggacaccacaggccaaagattctcatgtcagaggatttccggtcttttctcccctaggcctcaggaggacccagggaaatatctaaagccaacctatagttttggtgaactgagtttgcattgaaatgtttttggaaatgattttcaacatttataaaatcacatgccacatagaaatctgaatatttggctcttcttggaaaaccaggagatatgggaaatctgtactgactccaccatattgtctccccaccccttaagagggacagacctgcttggtggccaccagaagtggaattatgaaggccacggccatatgattctcaagaaaccctggctactcacataagccactccagaccatgatttctgtcttctctgtcttgaggtgcctacctgtgcagtgatggccatgagatgaacagcccagggagtccacaggaaatccacaaaatatttatttgaatttcagttatgagtgacacataggtctgcatgtcctgagaagttctgtacacccttatctcacttggccatagtcattggaagtttctgatgtgcgtttagaacagacatgtcccctcttgtctaccacagtcttctccacacttagagtttttgtaccaatgatagttcccacatagccctggcaggtctgaaccagttatgcctgcctactgagttttatatttcatgagtcatgagccatgggcaggtactgggggatgtagctggtaaagtgggacatgcattgggaacagaggaccaaacttttgctgtggaggttctcaaagaaactaccccattcttcagagctagctctgggcccacaggtgacccttggtgtccagatcacaagattcagtccaagcctgtcagtctttcataggaggccttagggcaacaagacaaattcaaccaaaactggactgagcactcttcctgcccatgcggctgtttgagacactcagtgcccccttacaaaagctgttctttttatattaggatgaattgtttcaaaccacctcaccaactctgatgcaggtggctaaacattaaggcctttgttatctcagagagagacaggcagatccaggagtgagtgattgagactaaacagatcattcctaagtgtcacatgtagatgcaaacaatgtccatgaagagaaaccttttcttctattttagatggagtctcacactgtcgcccaggctggagtgcagtggcacgatctcggctcactgcacaccctgcctcccaggttcacaccattctcctgcctcagcctcctaagtagctgggactacaggcacccgccaccacacctggctaattttttgtatttttagtagaggtgggttttcaccatgttagccaggatggtctcgatctcctgacctcatgatctgcctgcctcagcttcccaaagtgctgggattataggcatgagccactgtgcccggccaagaaaccttttctggaaagctccagaagacaccagctcagatcttagcaagaattgtcataccaaaatctaaagccatcagtgggaaagaaaatgaaggtactcaaagcctatgtaattctctctagagaatggaaaagggagtatagtctgctttcccttagcacagtgagggagactgatacatatcatgagatcttgccaggtggcagagatgagacagtatggcaggcagctttggacatggcttccaatgatctctgccctctggtattcatgctcttgtgtaatgctctccccttgactgtgggctggaccaagtgacttgcttctaactaaatttagcaaagatgatgggatctcacttctgttattaggttacaaatgactgacttgttggtattctccactgcatgatcagcttgcaagctttgattgacaagctgccattttggagaggcccatgtggcagagaactggaggaggtctcagaccaacagacgggtcctcagtccagcagcccacaaaaaactgaatgctgccaattacatgagtttgcttggaagcagagccttccctagtcaagccttcagatgatacacccccagctgacatcttgatgttagccttgtgagaaaccctaaagaggagtcagctagctgcaccaaagttcctgacctatagagactgtgaaatagtgactattgttttaagccactaggttttgagtaatttgttacacagcaataggtaactaatacagatggcttctgcaatagcagtaatacagtgccgcctaagattctgggagctgtggctttcccacatttgttgcccataactctcttgtgaattctctggtgatttttcttaaaagggggtgtctatagctgaaggctttcccattttcactgcatttgtaatgcctttttcccataggtactttatatagctttctcacataggagaggtgactgaagaccatcccacattccttagatgcaggggttttctctactgtgaattttttggttatagataagaatcgatttcttcttgagggtctttcttcataccaagtatttaaagatctctcttcagtgtgggttcttaggtggttgaagagggcaaaagtcttcatgtcttcccatagccactgctcttgaagggcttctccctatcatggcctgcccggtgttatctgatgttagagctgtgtggcagcatcttctcactcagctcttcttcatggcttccctgtgccatgagtactctggtgatggagaaaggaaggcctttccacattctcttttgagcttctcattattctggtactccagtgctggaagggggtagttaccctggaaagccttcacaaatgcctggcccttgagtcctctcacttatgaattttgctgtgcatgaactgaaaagtgctcttactgtgagccatgtcacatctgaaaaggtggtcttcaccataaatggtctactgttggtgaaggtttgatccactcccttgtgtggggtttctacctggagtacactgcctaacgttcagccaggagtacaatctttggcagggcaagggtgccatggtcagggtgaggaacgaccagtcatggagtactggtcctgtcacatatcccactactgagcctgttaggtgacattcacataggcagggagaacagagagggatctaggacagatgtggaagcagcagtggctactgaaactgctgttcagtgatgtgagcccaggccacccttcttttctagagatggggccttgctatgttgccctggatggactcaacctcctgggctcaagagatcctcctgcctcagcctctcaagcagctaggactataggtgtgcaccactgcacctggccaggcctctcctttatggggactcctgttcacatcccagccaatgctctcatgagtacttccttgtatgggggaggtcaaagaaacagcagcagctcacatgtgatgatgctgaaattacatggtaaataagctttttaaaataggtgccggccaggtgcggtggctcatgcatgtaatcccagcactttgggagtccaaggcaggcagatcaggaggtcaggagatcgagaccatcctggctaacatggtgaaaacccgtctctactaaaaatacaaaaaaattagctgggtgtggtggcgggcaactgtagttccagctactcgggaggctgaggcaggagaatggcgtgagccatttaggaggtggagcttgccgtgagccaaaatcgcgccactgcactccagcttgggcgacagagcaagactccatatcaaaaaaaaaaggtgccaaacaccatattctacaaggttctggatctctagctccttctaaaataccagctctgtcaactgtgttaaatgcccccatctgcctgtgcccactctgttggccagcaagactgtgaaggcatgaagtgtgtgttagtgaccagaaaccctggccagactgcaaaaaccactttcctggacgtcaggctatcacttctctcagctcccagttcctacctggggagtgatgggtgccaagatacagtttgagagaggtgaagtgaatgtacatgacattgcatttatctgctttaactgtggcaaaaactttaacatggcaaatacaaaggtctgtagctctggagttgttctgcacaccctcaccctgcacagtcccagttgatggggaactatggctattcctttgtccatgatggcatgtgccctagttcaccagtctacccaaatccctggttattacctcacatccagtgtttctctatgcacatagagtcctccatggacccctctaggtctttgccttggtgaccctgtgactattttagtgttgtagatgagtttatttttcctctgggtaagctctgggccctacggtaactgaaacaggccactatgttcaatccagagcctttcagtctttcccagtctttcacacagcaatgcaaagtaggctacaacaggacagagcaactacccgctcttctactgtgcccttaggcagattttgtgcccccaaaaggcactccccaatctatccattcattttctcaacctaccccaacagaacccctaagattaaaggtgacctgatcaataaggtctttattatcaccagttagtgcaggcaaggtaggtgattccagtggagggtgatttgtggcctcaatggacacatcttaggggttaaacacagacttgaccacatccacaaggaatgtgcatcttcctgagctcaaattagatttccctcaaggcccctcaaccagcatcggttcagctgagcacagtcctgaatccctagagaacacaggaaggaaggctcagggtactgttttccccatgcatgaggacaggactgctgcaaatttttggatccaggcaagatggaaagtgactatggcttctgccttatgctgcatgggtgagatggccctgcaaaggttcctgggctggtcagaaacagagtagcttctgaaggcttttccacattagcagtacatgtaggtaatttttctggtatggggattctgctgcatgaagtttgacttggctgaagattttctcacaaagaccacttccataaggctccactcaggtatgaatctttttatgctgtgcaaggttacaaagatggctgaagagtttcccacactggctacactcataagtcctttctctggtgtgaactttctggtgccgaacaagtgtagatctttcactaaaggcttttccacactggatgcactcatagggcctttcttgtgtgtgaactctctgatgacgaaccaggtgggagttactgctaaaggctctcccacattcactgcattcgtaaggcctttctccagtgtgaactctccagtgacaaataaggctggattttcggctaaagaatttcccacattcactgcatttataaggcttttctccagtatgaactttctgatgcttaatgagaatggagttttggctaaagaatttcccacattcattgcactcataaggcctttcttttgtgtgaactctccagtgttcaatgagagtggagctgtgagcaaaggctttcccacactcactacactcgtaaggcttttctccagtgtgaattctccagtgctgaatcaggctggagctgcggctgaaggatttcctacattcgctgcactcataaggcctttgcccagtatgtactttctggtgctggatgagggtggagctattactgaaggctttaccacaatcacagcattcaaaaggccgttctccagtgtgaactttctgatgtcgaaggagatgggagctttggctgaagtctcttccacattcactgcactcaaaaggccgttctccggtgtgaactttctggtgctgagcaaggttggagttattgttaaaagctcttccacattcactgcattcatacggtctttctccagtgtgaactctccagtgctgaatgagagcagagcttcggctgaaggatttaccacattgactgcactcataaggtcttacctgtgtgtgaactttctgatgccgaaggaaattggagctttggctgaaggctcttccacatttcaggcactcaaaaggcctttctccagtgtgaactttctcatgccgaatgaggtgtgatctgttactgaaggctttcccacattcatcacactcataaggtctttctcctgagtgaattctctgatgatgaacaaatgtgagtttgtggttgaaggttttcccacatgcaatgcactcataatattttacttcagtgtgaaatttctggtgcttcctcagcttagatgagtgactaaaggccttcccacactccttacacacatggggtatttccccagtgtgaaactttttattaccaaggattgatttctcctctaagaaatttccacctgttgggcatgtaaatggtatctcttcagagtgagttctcagatggttggggagagtggagctcttcaggaaggcttttccacagttgctgcactcgaagagtttctgtgtggtacagacttctggaagctgcccaagattggaatatggcttctgcccactgtcaacagcttgaagctggaggaggtcacagctgcccaggatgaccttcccaccttccctgcaagtgaaggggttctctgacaggtggactttagagctcttcataagtgcgtccctgtccttgtaccatctaaagggcttccctccactgtgctccttctggtgctggtgaaggtttgcattcaaccaaaagtctctcccacatgctccacatgtgtagggtttctcctcagactgtgttccctgatgctcagccaggtgcaaaatgtctttcaagaatggcccacacatgtcacaggagttagctttcttggtggaaggatctgcattagggatcctgacctgtaacacttctacagaaacattctgcttgggatgggccccctcaccctctactccatgccaagaacctgaaagtagagaaatgccagttaactaagaattccacttggtgggaatggttgacttcattagaaatgttacccaggaattcacacccaagaagaggtcccagggattgctgacaggccaacagggccatcatcagggtgaagaagggcccattactattggcaggatagggaccagccaagcaacagaataagggagacctcaccaggggtaaggacacagaaatgggtcaaaggacttaaatagacatttctctaaaagaagatatatacacaaatggccaataagcatatgaaaagaagttcagcatccttaaacatgaggagtatgaaaaccaaaaccataatgagataccacttcacatccactagcatagctataataaaaaaaaataaatgacaacaaatgaagtagaaaaactggagcacttatacactgcagacagggatgtaaaatggtgcagccaatttggaaaacagtttggcaagtctgcttctacagagctacacaagagaactaaaaacatccacacaaaaatgtgtacaggactgttcatagcagaatttttttaaaatttgagatggggtcttgctatgttgcccaggttggtctcaaactcctgggctcaagtgatcctcctgcctcagcctcctgagtagacggattataggcaccttgcccagcttctatagcagcatttttttctaacacctaaaaaatggaaacaagccaaatgctcatccactggtaaatggataaacaaactgtagtctttctatacactggaatatttggctataaaaaagaatgaaatattgatacatgctacaacattgatgaacttcaaaaacatgctaagagaaagccagtcacagaaaaatacatagtattctataaaatgtctaggaaacgtaaatctatatagtcagaaagtagattagtggttgcctaggaccggggggaaagggataagggaacatggggagtgacagctaatgggactgctaataggacctacagtttctctttaggtgatgaaaacatgctaaaattacattatagcaatgattataccatgtgaaaacatatagaaatcactagactgtgtactttaaaaggtgaattgtatggtttatcttaataaagctgtttttaaaaaatatctcactgggggctgggcgtggtggctcacgcctgtaatcccagcactttgggaggctgaggtgggtggatcacgaggtcaggagattgagaccatcctggctaacatggtgaaaccccctctctactgaaaatacaaaaaaaattagctgggtgtggtggcaggcacctgtagtcccagctacttgggaggctgaggcaggagaatggcgtgaacctgggaggcagagcttgcagtaagctgagatcacgccactgcactccagcctgggggacagagcaagactccatctcaaaaaaaaaaaaaaaaaaaaaaaaaggaaaaaaaaatctcattgggaaagagacagaatctgggcatgacctcatactgggtaacccgaccagggattggtgaatctcagtgggatctgttaggcagactggaggtgtctgatccccaacctttgcctccacaaggctcctgggcaacagctattaggaaagctcatgaggctgctcagagagagacaggggaagtacacacagcagaacctcagcaccccagcacctacaacaggaaacccgagaaggaagcagtacccatgatctggctttgggatgaacagagctttctatggggaaaagacacaaggcataaggtagtcatcaccatgctgagacagggcattaccaagtgaggtcacaagctcaaggttttccagcatcacactgtggtacaggtgcctctgggctgcatcaaggagctcccactcctcttgggagaagtatacagccacatcttcaaaggttaccatgctcttcaatgtggggacagctgagccacagggccaagaagtatgctgacaaagaaacaaacaattggtcaaatggaaatatgcaggaccttgctgtgtgactcagaatcctgatacatctaccactaatatctctttttcttatgatcctctcagtccacccactactcacccatccacagcttatcttcttcctcagggcccccacctaacatgccctggaattaatggtgcccctctctcctagtagtcccactggtcactgtatccaggccaacccaacctagaggaacaataggcaggtgggcagatggatgcttcctcctccctcctgctggccaattttccttgtgtcttctggctcatacctcccaaacataagaaaatttgggcttccctttcttaagcctcttgtaccagggccatgggcccaatggttcacattctctcacctttacatgtcactcctcagaccatacagttcttatatttccaacccctccctgttcacactgtaggcattctccctagcatctcaccatgcacatggcatacctgacagatgcaaccgggatccattcctggtccaagccagctacagagctccaaaaaccccactgcaagaggcagtcatagcccctcaagtcaatgcctcccctgccagccctgttccttcaaccatcagctgcccagaaccataagcagatctcaaatatctcttccctctgatatctttgcctttgtatgtgttgtctcctccccagtcatagctgtccttgctcttcctaacactcaaatccaagatccactggcccccaccttggcttggggactcagcttaggctgaccctttctgatcttgccactccaccagcctgacaaaaaccccaggaccctatttaagaagagataacatgccctgaccacaagaaggatggccgcaacaatgtagtgagctgtagagaagcaaatcaacctaaaccaaagcccaactctcatcctacttttgccgctatgcttcactgttgtcctagacctactctctgctcaggaggctcagccactatcttgaacccaacccacaactgcatgcagtgtccacacacaagcatccatcccttggatgtttccagcctaaacccgacataatttcataatcacatgtttagtggtctacttggcacctcaatttggtagtgtctgggacatctcaaatacaacatggccaaaatccaactctttatcttccccctgaaatctactcctcacaccaacttccacatctgaaagatctaaggtcaatttttttttttttttttttgagacagagtctcgctctgtcacccaggttggagtgcagtggcgcgatcttggctcactgcaagctccgcctcccgggttcaagccattctcctgcctcagcctcccgagtagctgggactacaggcacccaccaccacgcctgactaattttttgtatttttagtagagatggggtttcaccgtgttagccaggatggtctcaatctcctgacctagtgatccacctgcctcggcctcccaaagtgctgggattacaggcgtgagccaccacgcccggcaatttttttttttttttaagacagagtctcgctctgtcactcaggctggagcgcagtggcacgatctcagctcaatgcaacctccatctcccagattcaaacagttcttctgcctcagtttcccaagttgctgggattacaggtgcacactaccatgtcctggctaatttttctgtatttttagtagaggtggggtttcgccacgttggccaggctggtcttgaactcctgacctcaagtgatctggccgccttggcctcccaaagtgctgggattacaagtgtgagccactgcactcagccttaggtcaatcttaacatttcactttctttcactgtcccacatcaggtaatccatggcccagtttgggcagattcagaagccaaccatctgtcctacctccacgggcacccctctgtccagctacccaaagcacacatctggaccacatctgtcagctcctcactggccttcctgctccaccatcaccatccctccagtctgctgcccactaggcatccatagggcgtctgttaagactggagtcagagcacctacttcctctactccaaaccttccatggctcccaccaccatcagaatagaggtccagctcctcaggctgccattccaggcctaactattggtttcccttccctgtttccaccagactaaatggagaccggcagtccccagaatgcttccatttcatcaccactaaacaaggtacacatgctggtcactgtccctgggacagccttccagatctcattccacaggattccagaaatgggaatccctcgatataaccccttgcctggattcaggatggtaagggtaagtgactcccagggcagggcccaggacccacgtgtgaggacaggacacgatcaagagtcccaggacaccaacatcccctctatctgggcttcaggatcctgagggccggaatcccagcgggtgagggcctggggcacactccacttacctgcgccgggcccatcagcaacgctggcaaccccattagaacctgtgggctgggcagggccataacaggaggcccagggctagccctgccgctgggccgaaccctcacacttccgctgggtgacggtcgcactcaggacctgtcttcccaaatgcaaaatgcgcgcaaggcctctgggcaccgcagggacgaaggctgggtatggagaccctggagacgcgtggcgctggctccactttcgggaacaccttggctcataaaagcagagtaattagccgggcactatggtgcgtgtgaaggcgcggtgacggtccctgcacccactcccgtgccctggtgtggctccagaggcctgctgtagcccaacccaccagcagcaaaatgaggaccgcaatggcggcgccggaagtcccgcctctcaatgacagctcggacttgccactggtccgagctttcattggctcaaggatccccgccgtctatgacgctatttccctatgcccgtcacgctactgctaggtcgttgccaaggtgattgaggaatggcgtttattgcgtcgctgctcaggcaacgcaaactacattatccagaaggaccctcgcggtgcctcagggctggccattggcagccgaggagacaggcacttccgggcggagtgtaagacgctggccaatcacagcctggcagcgggacttccgtcgtcgtcctcggaccatcactttggcatttctcgattttgtctgcttctgaagggaccgcgttgtcaggcgagggacggaatcttggaggctccctgggcccatggaaacaggagcgaggaaggcacgagagtcggggaagttccgccttcttgacatacaagcgcccccaccgcggcgaatatcgcccctgagcccagtgttcgccccccacaacaccgcaccccccttccccaccctgtgccttagataaagccggcccagtgggaccctcaggttgcaccgcgcggaggtgtccgcggctctcgggagtcgtcgcccttggcgttatgttggctttagggagcgcgaggccgaggccaagaaaagctacgcattgggaggtcttgacccagtgtgcgcccggctgtaggcatggaacgtgcgccaaaggtctcctggcacccactccgctggactcagcaccattgtcctaagtctccgattgagaagtatctgccccaggtcctctgcgggccccactgaacagtgtggagcgttcacaggttgggggtcaccatttcagaatccagtttgttgagacgtggagggtacaggaggagggatctgcatatgcgaagacttggacttgaccctgacctgagcgttcaggcaggctctcatgcccccttggcagcgagtggagagcgtaagaggagtcctgcctctcctggcacaccgagggcgcctgggagccatgaaaggtgttgaacagaaaagggatggacatgacctgagttagaatttggaaagtatttcagtggttgctgaatgaacacactactggagaaggtggttgtagtggggctggaagcagggagactgtgggggaggttattgcagtattgttccagacagttatgatagtggcctgtccagaacggaagcaagaaggatgggagaagtgatcagattcccagtggatcttcaagatagagctaatggaattttttgctaccttagataagtggaataagcatgagtaggggtgaaggaccatcccaagtagttaggaagaattaggatgcctcctgtggagaatagaggttggcagttggcaggaggaggatgtttcatggaagattagcgatggattttgtaggtatagagtctgaattgtctggagacctgtgagtggaggtgtcaaatgggcctctggatatatagaattctggtgtggcttcaggacgtccagactgcattatgttggtggcctggcccagtgaacggcctgaggataggatttgggaaggagggttttaggttggaggaccagtggctagggctcacgctcagtgcttagatcacatctgtctgcccattggcttggtgttgcagggcttaatgacctttgaggacagggtcagtacatcttccaagaatgtggggctccttagtgaggtccaagggggcttctacagtgacatgatactacagagctttgtactccagtgcccactaggtaaggctactgtgtctcctctttcccctacacatgaaatctaggttttcctccgcctttccattgttccctctgggaggtgctgctggccctggcactggccagtgtcctgctgtgtccggaattgtttccttcctctgggttcttggtctcgctgacttcaagaataaagccgcggaccctcgtgttgagtgttacagttcttttttttttttttttttgagacggagtctcgctctgtcgcccaggccggactgcggactgcagtggcgcaatctcggctcactgcaagctccgcttcccgggttcacgccattctcctgcctcagcctcccgagcagctgggactacaggcgcccgccaccgcacccggctaattttttttttttgtatttttagtagagacggggtttcaccttgttagccaggatggtctcgatctcctgacctcatgatccacccgcctcggcctcccaaagtgctgggattacaggcgtgagccaccgcgcccggccctgttacagttcttaaagatggtgtgtccggagtttgttccttcagatgttcagatgtgtctggagttttttccttctggtgggttcgtggtcttgctgacttcaggagtgaagctgcagaccttcgcagtgagtgttacagctcttaaaggtggcacatccagagttgttcattcctcctggtgggttcgtggtctcgctgacctcaggagtgaagctgcagacctttgcaatgagtgttacagctcgtaaaggtggcgtgtccaatgttgtttgttcctcccagtgggtttgtggtctcgctggcttcaggagtgaagctgcagacctttgtggtgagtgttatagctcataaaggtagtgtggacccaaagagtgagcagcagcaagatttattgcgaagagcaaaagaataaagcttctacagcatggaagaggacccgcgggttgccgctgctggcttgggtggccagcttttattctatttggccctgcccacatcctgctgattggtccattatacagagcactgattggtccattttacagagcactgattggtccattttacagagcactgattggtccatttttacagagtgctgattggtgagtttacaaacctatagctagacacagagtgctgattggtgcatttacaatcctttagctagacagaaaagttttccaagtccccagccaattagctagacacagagcgctgattggtgcgtttactaacctttagggagacacagagcgctgattggtgcatttttacagagtgctgattggtgcgtttacaaacctttagctagacacagagcgctgattggtgtgttggcagtcctttagccggacagaaaagttccccaagtccccactggacccagaagcccagccggcttcacttttcactgctacttatccctggctgctgcataaacaacccccacaccttccctgggatcttgacaaccttgtgaagccacagtgatggtccctgcacccactcccacgcccttgtccagctctagaggcctcctgtagcccaacccacaagccacaaaatgaggaccatcatggcggtgccggaaatctcacccctcaatgcccacctggaatcggaagtctcaaaacctgtgtagcatatcacatgcagctgggtcgtttcctggctaggttaccctgtcaggatctgtgacttttctgtcctttctgccacattccctcactctagtaggagttttctgccagctgtcccttgtgagtcccagtgggcactgacatggtcattgattgtggggtcactgagcattgactttgtgaagttcagttctttccagctatatacctgcataggtgatcttcacctacggtgatttgtcatggggtggatcaccttgacgtgggctgccttctcacaaaccacttgatgagagctgtataggatcactgccaccacccccgccatgtgatcacctaactagaacaaatgaagagacctggctggtggacagggtggcttgaattaggccatggacagagaggccccatggtgcaccagttctgttgagtggaagacagctgtggcagagctgttggcagtgccctggtggctcacctggtacctgagttgtgccctctgttgtcctggcaccaggatgtatagctgtgccttttaaaaaaaattttcctgaccttcttctgacactctatcctactttgccctgactcctgttccctggatggcttcctctctgtcttccaagattcactctttccccttctcccgtcctcccctccagtggccaggtcttctaccattggcctccctttaatgtgtcttgaacggataatgtatctttaaatagttgttatctgcacatggtggctcataactacagtcccaactacttgggatgctgaggcaggaggagcgcttgagaccaggagtttgagtccagcttgggcaacataacgagatcctatctctaaaataaataaataaatacatagatacctaaatagtttttgaaaacctcttcttccgtgagactggcttgttccatttgaggagtatgggcataggtgtcaatggttcaagacctggacttcgctcactgcatggtactgacctgtcaccagacactagggccctgcagctccacattttgcagaacctacagagaactgacactgaagagatagctgataaatacacagcatatggaaaggtgtttgaggggaagcaagccttttctcctaccaaaaaacttcacagtggaaaaaattgcaagtgtattatgagcatgggaaggccttcacttttgtcttcatcctgagaaagcaggagtacatgcacatcttcaaaggcccttacaagtatagtaacatggggaatcctccagccagaactctacctcctttgagcaccaatatgttcaccccagagaaagtccccataagcgcaaggagtgtggtccagccatgagcaaaattttgcaaaactctcctctgtatcaaaatggtcataccctaatgaaggactcctaagttcagggaatgtggggcactgccagctgtcctggtggcttccctggtacctgacttgaggttcatacatgttatattcagagttctgctttcattagcaaaaacaaattaacaccggaaaatggttgtacaaatgcaataactacatgaaagctttcagtgaaatatgaaacctcatcctgcagaattctcatcagagaggcccagtgcatgcagctaatgttggaaagcctattctcaattttaatcctatttagcaccagcaatttacagcattgtgagtgtagcatgtaggagagcaaaaaattgcagctcctgccttgatgtgcacaaagtgattcacactggaaaaaccctctatgagtgcagccagcatgggagagcatcggccacagctcctgccttgcttggcaccagaaacttcaccctggagaaaagccttttgattatagtaaatgtaggaaagtcttcacctcccttatttagtataaaagaattcacactggccaggtgtggtggctcatgcctgtaatcccagcactttgggaggctaaggcagggggatcacctgaggtcaggagtttgagaccaacctggctaacatggcaaaccccctctttacaaaaaatacaaaaatcagctgggcatggtaacgcccatctgtaatcccagctacaccagaggctgaggcaggagaattgcttgacctcagggggcagaggttgcagtgagctgagttagagccactgcaccccagactgggtgacagagcaagaccctgtctccctcaccaaaaacaaacaaacaaacaaacaaaaaacacagctgggtgcagtggctcacgcctgtaatcccagcactttgggaggccgaggcaggcagatcatttgaggtcaggagtttgagaccagcctggccaacatgatgaaaccctgtctctactaaaaacagaaaaattagccgggcatggtggcaggcacctgtaatcccagttactcaggaggctgaggcaggagaatcacttgatcctggaaggcggagattgcagtgagccaagatcatgccactgcactccaacctgggcaacagagtgaaactccatctcaaaaaacaaacaaacaaaacaaaacccagccctacatgagtagccttcagccacagctaaaccttgtgtagaaggattcctccctgaggagacactccatgatggccctgcatgtggagaagctgacagaacccatgttgtaccatgatcgccctgcatgtggagaagctgacagaacccatgttgtactttgcaacccgctgagggaccttggcagagctatcacaccactgggtcctgtggtggaagcccatctctgttttatggtgacttcccagttgctcaatgtaagtcactccctgtttcctgtttatactaccttggagggatggtaggggccttgcacacattggggtggtatcatgctcactcatgatggggtttgacatggacatgaccccattccaagcaaggagcctgattggataatttctttctcttttttttttttttttttttttgagatggagtctttctctgtcaccaggctggagtgcagtggtgcgatctcagctcactgcaacctccgcctcccgggttcaagagattcccctgcctcagcctcccaagtagctggaattacagccacacaccacctcgcccggctaattttttgtattttagtagagacagggtttcaccatgttggccaagatggtctcgatctcctgacctcgtgatccccccacctcggcctcccaaagtgctgggattacaggcatgagccactgcacccgacctctctccttttgtcttttcttttttcttttcttttcttctttcctttcctttcctttgctttcctttccttttctttcttttctcgtcctttcttttcttttctctctttcttttttttgaggcagagtctcactctggtgctcaggctggagtgcagtggcatgatctcagctcactgcaacctctgcctcccggtttcaagcaattcttctgtctcagcctcccaaatagctggacttacaggcgtgtgccaccatgcctggctaatttttgtatttttactagagacggagtttcaccatatattggccaggctggtctcaaactcctgacctcaagtgatctgcctgcctcggcctcccaaagtgctgggattactggcgtgagccaccatgcctggccgacaatgcaggagcttaaccaaaggaccacgttggctagggtcaatcagctgccccaggtgaccacccttagtgctaatcctgtgcagggtaggggtctgagccaaaaagaggaggctcttgtgtgtacagaaggcaatttgttgctatttttatttcatgcccaattcattaagaatgtttcaaacaattagcatttttctaagtattaagtaattaacatttgcctgaagaattacacattagatggataatgtaaaaataaagtgtttaagaagttaaacgtctccaaacattaaacattacttgagattggacatgatgggtcatgactgtaatcctagcagtttgggaggctgaggcaggtggattgcttgagtacaggagttcgagaccaacctgagaaacatggtgaaacctcgtttctacaaaaaaagtaaataaaattagccaggtgatatggtttggctgtgtccccacccaaatctcatcttgaattgtaactctcataattcccacacgttgtgggagggacccagtgggagataagtgagtcatgggggcagtttccccacactgttctcgtggtagtgaataagtctcaagagacctgatggttttataaggggtttcctcttttgcttggctctcatttgctcttacctgccaccatgtaagacagggctttcaccttctgccatgattgtgaggcctcccagccacatggaactgtgagtccattaaacctctttgtcttcataaattacccagtctcaagtatgtccttatcagcaatgtgaaaacagatgaatatagtaaattggtagagtggggtactgctataaagatacccgaaaatgtggaggcaactttggaattgggtaacaggcagaggttggaacagtttggaagcctcagaaggagataggaaaatgtgggaatgtttggaacttcctagagacttgttgaatggctttgaccaaaatgctgataatgatatgggcaatgaactccaggctgaggtagtctcaaatggagatgaagttgttgggaactggagtaaaggtgatgcttgctatgttttagcaaagagactggtggcattttgcccctgctgtagagatttgtggaactttggatttgagggagatgacttaaagtatctggtccgggtgcagtggctcacgcctgtaatcccagcactttgggaggctgaggcaggtggatcatgaggtcaggagatcaagaccatcctggctaacatggtgaaaccccgtctctactaaaaaaatacaaagaaattagcctggcatgatggcgggtgcctgtagtcccagctactcaggaggctgaggcaggagactggcatgaacctaggaggcggagcttgcagtgagccaagattgcaacactgccctgcagcctgggtgacagagcaagactccatctcaaaaaaaataaaaataaaaataaagtatctggtggaagaaatttctaagcagcaaagcattcaagaggtgactttgatattattaaaagcattcagttttaaaagggaaatacagcataaaagttcagaaaatttgcagcctgaccatgcaacagaaaagaaaaacacattttctgtggagaaattcaagaaatttgcataagtaaccaggagtcaaatgttaatcgcccggacaatggggaaaatatctccaggacatgtcagagacctttgtggcagcccttcccatcacaggcccagaggcctaggaggaaaaaatggtttcgtgggctccccctgctgtgtgcagcctacagacttggtgccctgcatcccagctgcttgaactatggctaaaaggagccaaggtacagcttaggctgtggcttcagagggtgcaagcctcaagccttggcagctcccatgtggtgttgagcctgtgggtgcacagaactcaagaactgaggtttgggaacctccacctagatttcagaagatgtatggaaatgcccagatttggagcaggcaaaagtttgctgcaggggcagggccctcatggagaacctctggtagggcagtgctgaagggaaatgtggggttgaagaccccacactgagtccccactggggtactgcctagtggagctgtgagaagggggccaccatcctccagactccagaatggtagatacaaccaacagcttggaccacgcacccggaaaagtcacagacactcaacaccagcccatgaaagcagctgggagggaggctgtaccctgcaaagccacagagctgcagctgcccaagaccatgggaacccactgcttgtatcagtgtgacctggatgtgagacatggagtcagaggagattattttggaactttaagattcgactgtcctgctgcatttcagactttcgtggggcctttagcccctttcttttggccaatttctcccatttggaatgggtgtatttatccaacggctgtaccccaattgtatctaggaagtgactaacttgcttttgattttacaggctcataggaagaagggaattgccttgtctcagatgagattttggactgtggacttttgagctaatgctgaaataagtagactttgggggactgttgggaaggcacgattggttctgaaatgtgagcacgagatttgggaggggcgaggaacagaatgatatggtttggctgtgtccccaaccaaatctcattttgaattgtagctttcataattcccacatgttgtggaaggggccccagttagaggtaactgagtcatggggacagtttcccccatactattcttgtggtagtgagtaagtctcacgagatctgatggtttcataaggggtttcctcttttgcttgactctcatttgctcttgcctgctgccatgtaagacgtgcctttcaccttctgtcatgattgtgaggcctctccagccacgtggaactatgagtccactaaacctctttttctttataaattacccagtctcagatatgtctttatcagcaacgtgaaaacagactaatacaccaggcatcgtggctcctgcctgtagttccagctacttgggaggctgaagttggaggactgtttgagcatgggaggcggaggttgcagtgacccgagtatgcaccactgcactccatcctgggtaagagagtgagaccctgtctcaaaaaaaaaaaaaaaaaagtaaaaaaaaattgcttgaaatgttaataatgcctctaagcatttgattaaatcacaatagtacttaagtgttcttaaattctttcaaagcaggaaaaatttaaataaaaacattcaaaaattgtcgagctatcttacactatagggatctacaagtagaatcaattctgtggacagttatagctgacagtagacagatatttatagatggaggtgggtatagaggaagacaaaatgaattaacgtacttgacatctgagaactgtctaaggatcctaaaaacaagaccctcacagggaagcaacaaagagagaatcgtttattctctgccaacaacatggtcagtctacattgagactgccctgccttttgttgttatgtgtcaaagacacttagattggtccagagaaaaaaggaacaaagcatccatgttgtgatgtgtggggcaaagcaagaactagatggtctaaggacaagcaaggctggggaattaccttctgctcgtccaagttacaaggaaaacaagttttgggcgagcgtccaagaacaatcacagaatcaagacaaatgacaagcgggtagtgtcattacaggctgagaattcttggtgtagaggttgaaaaacggaccttaaacctttacgggacactgacacacagagagatcaaaccctcgcccaggatgcacagtcagtgagatgcaaagctgggaagggaacccggagctccaggcatctgctcctccacctacacctgccctacccggtgcgttttctcctccctgctacctgctggtgttgccttctggaacctccgcagtttctgctttcacacctgcagggtttagtctccagggctgcttaggtgggtgccaggaactgggaatccccaacgcgggacaacctgccgggcgactcaaccagtgccacggagcccttggaaacccgcggcagctgcgctactccatttccaggcgcccagcgcggcggcgcttagccgttgccatggagactggtaatggccccgcctccgcgccgaaaaacaggcaggaaccacataacccagaaggctgtgcgcaagcgtctgcgcgcgtattggggcaatgtgagctctgggggctggacttccggcgttgggactgtcacttggctgctcgcgtcaggccacaccggtggtctgggctgtggcgcgcgggtcggggcccgaggcgggcggccaggaaggtacggaccacgagcagccggccgcgcccccaagcctcggtatcttcgagtatgacgtggtcggcccgggggcggtcgggccccggcgggaaccacgcgttctcccgccccgcggaagcccaggaggcagcgcattgggcattctgcgcccatgactgccgggcaggctgaggcgcggggcagccgcgggaggctgctggcggggatggcggtcccgggtggtccatgcctttcttccctcccagttgcgggttccgctggcggcggtggcgctgacaagcccgcgccgggggggcgggggagtccctgctcacacagactgcgcccccacggagtgaggccgcttcctagacctcgcctagtcgtctttcctctccctgccctgggggggttgcgggggtcagtgcaaactcctgcgtccagggcactggtgagctcccgacttccggcagccagggggctgaggtcccgaaggaggctccgaggggagagtcctgcgtgtgcaaaacctgggaggggagccgaagcccagatgcttctgggactgagcgctctcgatgtggagctggagtagaggggatgtgtgcggctgcagtagcaggcgagggagtgggctttatctcgagggcgtcgggagacatagaagttttgaacagaatcaggacatcctctgagttgggactttaaaacggttccaccgtttgttgcgtggagaacagacatgcaggggtgtcggcatgaagggaagaaccgactgccacagtctgggcagcagtggaggtgggcgaccaggtgaattctggtggatctgcggatgcatcaggtgtgggctgtttgaagaactaagtaccccatgttgttcagcctgagcgcctggaagaagagagctgctgtagatagaaaggagaattgaaaggaaagcaggtttccttcaggggaaagatcaagagtctgggatgtcccaggttggtcatgtcactggacctgacgttgttggtgtcctgggctgaggacagggcctataaactggactgaagaaggcgatgagcagtcaggcgtgcggagttacagcttgagggtaaagaaaaccggctggggtgcctgaggctatcaggggaggagttcggcaggtggctgaataggagagggtggcagcaatgtgggaaagaaattgcgggagcgctgagatcgagaccatcctggctcacacagtgaaacccggtctctactaaaaatccaaaaaaattagccaggtgtggtggcgggaggctgaggcaggagaatggcgtgaacccgggagccggagcttgcagtgagccgagattgccccactgcactccagcctgggtgacggagtgagactccgtctccaaaataaaaataaataaataaataaataaataaataaataaataaataaataaattgaggagggggcgccatgtggagggaggaagggattgagttcccctgtgttcacaggttcttggggctgcacccctatgacgactggtggggatcatccagtccctcaggctggatgagcagcctggaaatgtcaggcaagcgcagcaggggaaggtctcagtgatgggcatgcctggggggtccacagctgggacttacacccttgcttattacaaaagcaagaagggcacatctggggagggtcatgaatggtcatgctgagtcacgagtggatatttggggctgcccttggtgtggcagctaagggcccagccagggcttgctctagcctgcttgtgtaggggtggccagtggggaagtcaagaagccatctggggcctggaccaggagggcagaggggaggggtcccagacaggtgagggaagtgccacctgaagataatctcggggtggaacccaaggaaggagggacactgggggaggtgactgttgggatggggagcttggtcctggctcacagccataccttagaccatgcctacctccacctccctgctgttttaggacctgatgaccttcgaggatgtggccgtgtacttctcccaggaggagtgggggctcctggacacagcgcagagggccctgtaccgccacgtgatgctggaaaacttcacacttgtgacctcacttggtaaggccctgggtgctccatgaaaagtgcacttggtgacaatcaggactgcctcttcacttccctcctggttgatgagcaggatcaaatctggccagggccacgtggaacaagggtctggtcctgtagacacaaagtttggttgggtcagccactccttgccgccctgtccagctgtggcctctctcatgcctgggctcagtcccgttgctttggtgctctgggcacagttgctgctctggggacacatgagctattcctatgagccccttgccctgtgctatctttagattctcccagttgcacagattactgtctatttccatgaagccctgactcctgctctctgttgggaggtgggttgtcttgacctggggctgggctctcacctgctcctcctcacaggactctctacctcccgacctcgtgtggtcattcaacttgagcgtggcgaggagccctgggttcccagtggaaaggacatgaccctggccaggaacacctacgggaggctcaactctggtgagtgggagctcaggtggggtgaactaaggaccaacctgtggccaagcccatgtccctgcttttctgactctggaaacacatcctcctctcctgcctcctacctgactcccttctcttccatcatcagcctctcctggaggctgctgccttagtaggtgcccttgaagggagagctccaagggcacaggagctgggttcacacagaagggcctaccttcagctgggctgtgtggccttgaaccctccacaactagcagccattattgataggtatttatttcgcccatcatttatctttgtattcatcaaatgtttcctgagggcttgtgggcattgtagacacagccttgaccaggacactcatggtcctgcctttgtggggctgatggtgctaggggagacgcagtgagtacgtaggattcaggagtgcagtcttgagcattggttggaggtcattgcaagagcaggtttgggagtgggtgcccaagacggggcaccaggggagaagggagtgagctatggaaagggagggggtggaacagccagtgtggagacgtgggtggcacgcagcagctgctgttttcctcagcttcacatcctgggtgtctgggggctgccgccttgatcatgggagtccccactgcagtcagtgccacacctgtcagggcagatgcttcctccaaaccccagcccctcctgcagagccagcctcacctcttctttttccctaagcttttgtcccggctcctgggctcccccttgcctgtccactcagcctgccctggtcctctcctaaccaggatgccccaggcaaccaccgtttctctgcgtttaggttcctggagtttgacagaggatagagatgtttctggagaatggccacgagctttcccagataccccacctgggatgactactagcgtcttcccagttgccgatgcctgccacagtgtaaaaagcctgcagcgacaaccgggtgcctccccatctcaggagagaaaacccacgggggtgtcggtgatctactgggagaggctcctgctaggctcgcgcagtgaccaggccagcatcagcctgcgactgacctccccactcaggccccccaagagcagccggcccagggaaaagaccttcacagagtaccgggtgcctgggaggcagcccaggacgcctgagcggcagaagccatgtgcacaggaggtccctgggagagccttcgggaatgcctcggacctgaaggccgccagtggtggcagggatcgcagaatgggcgcagcttggcaggagcctcatagactcctcggtggccaggagccctcgacctgggacgagctgggcgaggctcttcacgctggggagaagtccttcgaatgcagggcgtgcagcaaagtgttcgtgaagagctccgacctcctcaagcacctacgcacccacaccggggagcggccctacgagtgcacccagtgcggcaaggccttcagccagacgtcgcacttgacgcagcaccagcgcatccacagcggcgagacgccctacgcgtgccccgtgtgcggcaaggccttccggcatagctcctcgctggtgcggcaccagcgcatccacacggccgagaagtccttccgctgctccgagtgcggcaaggccttcagccacggctccaacctcagccagcaccgcaagatccacgcgggtgggcgtccttatgcttgcgcacagtgtggccgccgcttctgccgcaactcgcacctgatccagcacgagcgtacgcacacaggcgagaagcccttcgtatgcgcgctctgcggtgctgccttcagccagggctcctcgctctttttgcaccagcgcgtgcacacaggcgagaagcccttcgcctgcgcccagtgcggccgctcctttagccgcagctccaacctcacccagcaccagctcctgcacacgggcgagcggcccttccgctgcgtggactgtggcaagggtttcgccaagggcgccgtgctgctcagccaccggcgcattcacacgggcgagaagcccttcgtgtgcacgcagtgtggccgcgccttccgtgagcgccctgccctcttgcaccaccagaggatccacaccacagagaagaccaatgccgcagcaccagactgcaccccggggccaggtttccttcagggacatcatcggaaggtgcgccggggagggaagccaagcccagtcctgaagccagcgaaggtctgaggtcacaggtcgcagcccaaccctttcttggccttctgtgaatcccttccacagctaaagggtccgagtgctcttcagatccacgatggggaaaagctctgtgcctgagagtcagggacgagggagaccctttggctgtggttccatttgcaggtggggacaggatttgccagtttagtcatagctcacacctccatcctcaaagaggtaacactgcagaaacatcagagggaggacatgtcagctggaactctggtggggctgaggctgtagttggggccataggacgccgacaaaggcagcgctgcatggtggtgctacttcatgtgttatgagagtggatgctgaggtgagggggatgcggacatggggtaggatgacctagagaaacttatgatgtctgcacacaaactggccgctagacggacgctgaggacattttccccctgaggcctctattcaaggcttcctgggggccatctcagcaaacaggagactacaggggactggggatcagggtgtggcctgtgagtgtcagcctcctcctcggaaaaagaaaagctttgggtcaactcagcatcatgtttgcagatgctgacagacgggatcctaatgagagtcaatgtgtgctcactgccagctcctgggctgtgctctggtcagccaggtgtgagggcctggcctggggtcacacagctgactcaggagaggaatgcccatggttctcagcattggaaggacaaacctaggatgatggctttccagtggcactcgttcaggttttcgtccaagtctcagcttggccaaggcctgtcgctcactcatttacaaaagtcgatgtgaggaggagcctttacacctgtggagacagtgatagctttggagcagataaggtggagctgctcatttttgctggatttggtggccgatccccgcccccacccccaccccctccatctcacctttcccttgttatgcctcctcaattggaggctggacagagagctgaataggaaggacttgccattacctaaggccatgtgtgacagcctcctgaggacctccccaacccagtgtgatgggcctgcatggcagagacaaaagggtagactgggggtcatttgcttcctgtggccttaagcctactaggccccatccttacctgagacctcacctccaagaaattaatggtcttttcaatggagaaaaaaaaagactagtatttgcaacttcaaatagatgtagtttcctttacagccgtgtggacctccacagcacagcctcctgtctctattccagggtatgattcagttgtttgtttgtttttgagacagagtctcaaggcaactcttcttgcccaggctggagtgcaatggcacaatctcggctcaccgcaacctccgtctcccaggttcaagtgattctcctgcctcagtcttctgagtagctgggattacaggcgcccaccaccatgcccggctaattttgtatttttagtagagacagggtttctccatgttggtcaggctggtctcgaactcccaacctcaggtgatctgcccatcttggcctcccagagtgctgggattacaggcgtgagccactgcgtttgtttttcatgaagcgtctcagtctgtcgcccaggctggagtgcagtggagcaacctcggctctgcctcttgggttcaagccattctcctgcctcagcccctccagtagctgggattacaggcttgcaccaccatacctggctaatttttgtatttttagtagagacggggtttcaccatgttggctgggctggtctcaaactcctgacctcaagtgatcggcccatcttggcctcccaaagtggtgagattacaggcgtgagccactgcgcctgcctacataccatgattttaaagttgcagctgtttcctattgcttgtaactcagtcttgtcttttcaatggtaaccaatttctgtttcaaactgaaaggttcatgagggtgagttcttctattagtctgttttgtgtcactataaaggaacacctaaggctgggtaatttataaagaaaagaggattaattggctcatggttctgcaggatgtacagccatggcaccagcatctgcatggcttctggtgggacctcaggaagcttgcaatcatgatggaacatgaaggaagagctggcatatcacatggcaagacaggaagcaaggcgggggggaagtgtcacacatttttttttttttttttgaggagtctcgctctgttgtccaggctggagtgcagtggcacgatctcggctcattgcaacctccgcctcccgggttcacgccattctcctgcctcagcctcccgagtagctgggactacaggtgcccgccaccacgcccagctaatttttaatatttttagtagagacggggtttcaccgtgttagccaggatggtctcgatctcctgaccttgtgatccgcccgccttggcctcacagcagagtggtgggattataggcgtgagccaccgcgcccggcccacttttttttttttttttctgaaatggagttttgctcttgttgcccaggctggggtgcaatggcacgatctcagctcactgcaacctctgcctcctgggttcaagtgattctcctgcctcagcctcctgagtagctgggattacaggtgtgcaccaccatgtcagctaatttttgtataatatttttagcagagacagggttttgccatgttggccaggctagtctcaaattcctggcctcaagtgatccacccgcctcagcttcccaaagtgttgggattacaggtgtcagccaccgcacccagcccatcacacacttttaaacaaccaaatctttcatgaactcagagcaagagctcacttctcaccaagggggatggtggcaagctattcatgaggaatctgcccccatactatagtttggatgtttgtcccctccaaatctcatgttgaaatgtaatcctcaatgttggagatggggcctggtgagaggtgtttgggtcatgggggtggatcgctcttgaatctcttggtgctgtcctcaaggtagtgagttctcacaagatttggttatttaaaagtctgtggcacctccttcctttctctcttgctcctgctctcaccaggtgagatgcctcctccccctttaccttctgccatgattgtaagcttcttgagaacctagcaagaagcagattctgaagccatgctcgtacagccctcagaacagtgatccaattaaacctctcttctttataaattacacagcctcaggtatttctttatagtaatgcaggaatggcctaatatacctcatgatccaacacctcccactaggccccatgtccaacactggagatcacatttcaacatgagatttggaggagacacacatccaaaccatatcagttctcttgtccctgagtgaagaggcacttgctccctctaaacccaattctaggtgactagagatttatgaaggtgtcgggatgtttgttcatgatgcatagtggcctcatagggtctccctacttcttctgcaagaagaacaccttcaggggctttcagctcagccagaagattcacataaaggttgttcatctggtaccttgagcactctgccaacacaggtgatcacagattccaagacacataaaagagtgaatcacaactcactggtgactcattgaggagtgatgctcacaaagcaacacacttcgtctaaatacactgtactaaccttggtcacttttgaaaaggtatttctacaattatttgaaactgctcatgaaaactgagctttcccttaaggagcaacccccccacccttcgaaacctatggagatcctatttccaaaaacttaggtaaatggacccaggtcactcgagatgaccctaaaatgcagtggccaaaacggagatcttttgaaattcctaaagtaatatatttgtgtgcacaataggaaacttaatatgtttgttctaaaaccagacaaattggatgggaggcctactttctgtttgtgcaggctatactctgataagatatttgaaaggttttttaaaaagagctctataggccaggcacagtggctcatgcctgtaattccagcactttgggaggccaaggtgggcggatcacctgaggttgggagttcgagaccagcctgaccaacatggcgaaaccccatctctactgaaaaatacaaaaattagccaggcatggtggtgcgtgcctgtagtcccagctacttgggaggctgaggcaggagaatcacttgaacctgggaggcggaggttgcagtgagctatgaaactatagcaaactccagcctgggcgacagagtgagactccgtcacaaaagtaagtaaataaaatacaatgaattctatggtcagatgtcagcttaattaaaagctgatattcaggctttttttttttttttaagaaaaaatacctttctgctttttctcatttggagcctgtttctgggaattttttttttttctgttgactgaaacccctttttacatatgtttagtccctttgtttgcttcttttcttgttagtatgatgtaaagttttattggccttctgaaaaacttaaaatctccccaaattggcttagagctctcccattttcttctactttttcttcctttagctatctttgataccacataaagaaatctagaggagtcttctaatatctctgagaccctttgaggaacacagtaaagtgtcacatacaccttttatggagtcttctgtcttcctcatggaatcctaagtgtagcaggcagtttatcttaggtctaaagctctgatctcttttacactgagttctctgaccttttggcttggggggtaccaagggttactttgttctatgaaagaacatgatctttgggtgtgcactggctggcaagttactggcaagggctgcagttttggctgatagcagttgttttcagtgagtggttattactgcagggtgtactaattcctttgcatgtttaaataagaaaagtatggtttgaacacttggagacttatagaaacactcatcaccaagggggaagaatcctttgggagatgggctgatcacagatcacagagtgggctaattggtgctgggtgtcccaccagcatcagggaatgtccatgcagtgaggtgcactgtggaaacacagccctgtcctgtggtatttccatcttgtggggtcctcaagattccattttaaagtggaatccttgattttatttatttatttttattttttgagatggagtctcgctctgttgcccaggctggagtgcagtggcgtgatctcagctcactgcaaggtccacctcccgggttcacgccattctcctgcctcagcctcccgagtagctgggactacaggcgcccgccaccacccctggctaatttttttgtatttttagtagagacggggtttcaccatgttagccaggatggtctcgatctcctgacctcgtgatccgcccgcctcggcctcccaaagtgctgggattacaggcgtgagccactgcgcctggcctggaatccttgatttttaaagctctagatgttctgcctttcaactgtgccagttttttacatagatggggtttctctatgttggtcaggctggtctcaaactcctgacctcgtgatccgcctgcctcggcctcccaaagtgctgggataacaggcgtgagccaccgcacctggcctatgttgagttttaggccacaaaaaattgaccaaaaattttttgacaattgcatctttaaccatggacattttaagttttgtcctcagctgggcgcggtggcttatgcctgtaatctcagcactttgagaggccaaagcaggcagatcatttgaggtcgggagtcggagaccagcctgaccaacatggagaaaccccgtctctaataaaaatccaaaatttgctgggtgtggtggcccatgtctgtaatctcagctactcaggaggctgaggcagaagaatcgcttgaacccaggaggcggaggttgcagtgagctgagatcgagccattgcactccagcctgggcaataagagcaaaactccatctcaaaaaaaaaaaaaaaaagttttgtcctcttccttcttgaggagttgctttgaagcttcacagcaaccaaggaatctatttcactgatgaaacaattcaatctactttaacatatggctggttatttagaatgtccattttgcatactactctcagtcttccagactgctggaatgtacaaataaggtaatagaaaatcaatttacaaagcttacagaaacttttaaccttccgtggcctaaggcttttccaatggtcctgaatgaaggaacctacaaaccagctctccttaatgtgagctcctgggagacaaaaatatcaaagatcaagggctccaacctggagattttgtttatgagaaatgccatctaataaaggactccctacaaccatgttgaagagaactccagcctgggcaacatgatgaaaccccatctcaacaaaaagaacaaaaaaagcaaaaattagctggcatgcacctatagtcccagctacttgggaggctgaggtgggaggatggcttgggcccaggaggcagaggttgcagtgaggtgggttgtgccactgtactccagcctgggcaaaagagccagaccctgtctcaaaataaagaagttgagggaggcatatcagatattcttaaccaatccttgtgcaagctaaattcaaaggcattgacttgcagattcacatttttcatttttaaaaaatgcagcccatggccgggcgcagtggctcatgcctgtaatcccagcactttgggaggccgaggcgggtggatcacgaggtcaggagatcaagaccatcctggctaacacggtgaaaccccgtctctactaaaaatacaaaaaattagctgagcgtcgtggcgggagcctgtagtcccagctactcgggaggctgagggaggagaatggcttgaacccgggaggcggagcttgcagtgagccaagatcctgccactgcactccagcctgggcaacagagcgagactccgtctcaaaaaaaaaaaaaaaaaaaacaatcctgcttgagtagacatcttcgatcattccagatctccaactgaggcagtcccattccccaagaaggaagaggacaaaacttaaaatgtcatggttaaagatgtgattgtcaaaaaaaaaaaattggtcattttagtttttgtggccgaaatctcaataatcataattatgactgatagcataccatataccagtcatcttatagctcacacgaggatgagaagtagaaaatttgttagaaaatatcactcaggcggtcgggcgcggtggctcatgcctgtaatcccagcactttgggaggccaaggcaggtggatcacctgaggtcaggagttcaagaccaggctggtcaacatggtgaaaccccgtctctagtaaaaatacaaaaattagtcggttgtggttgcaggcacctgtaatcccagctactcaggaggctgaggcaggagaatcacttgaacctgggaggcagagattgcagtgagcagagatcacgccattacactccagtctgggccacagagcaagactccatctcaaaaaaaaaaaaacacacacacactaaaaaagaaaatatcactcaggccaggtgcagtggctcacacttataatcccagcacttttggaggccaaggcaggcggatcacttgaggtcaggagttcgagaccagcccaacatggcaaaaccttgtctctactaaaaatacaaaaattaggtgggtgtgatggcatgcacctgtaattccaactattcgggaggctgaggcacgagaatctcttgaacccaggaggtagagattgcagtgagccaagattgtttcactgtgctccagcctgggtgacagagtgagatgctgtctcaaataattaaattaaaaattaaaaaatgaaacgtttgaagagttaaaatgcctccaaatattcatacattgcttaaaatggtaataatgcctctaagcatttgatcaaatcacaactttaatactacttttttttttttttgagacagagtcttgctctgtcacccaggctggaatgcagtggtgtgatctcggctcactgcaagctccacctcccaggttcatgccattctcctgccttagcctcctgagtagctgggactacaggcgcccgccaccacacccagctacttttatttttgtattttttagcagagactgggtttcaccgtgttagccaggatggtctcgatctcctgacctcaagatccgcccacctcggcctcccaaagtgctgggattaccggcgtgagccacagcgcccggccacagcttgaatagttctaagtgttggggttttttttcttcagggtttttgaactttaatacttccttttttttttttttttttttttgaaacggagtctcgctctgtcgcccaggccggactgcggactgcagtggcgcaatctcggctcactgcaagctccgcttcccgggttcacgccattctcccgcctcagcctccccagtagctgggactacaggcgcccgccaccgcgcccggctaattttttgtatttttagtagagatggggtttcaccttgttagccaggatggtctcgatctcctgacctcatgatccacccgcctcggcctcccaaagtgctgggattacaggcgtgagccaccgcgcccggccctgaactttaatacttctaagtgttggggttttttttttccccctcagggtttttgtttgttttttcctgagacagggtctctctcttacccaggctggagtgcaggggctccatcatagctcactgcacactccaactcctgaactcaatcctcccacctcagcctcccatgtagctggtattacaggcatgcaagaccatgctcagctaatttttatatttttttataaagatggggtcacattttgttgctcaggctggtctcaaactcctaggctccagtgatcgctcaccttggccacccaaagtgctcagattccaggtgtgagccactgcgcccagtcctgaaatgttcttaaattctttcaaagtagcaaaatttatattaaaacattccaaacatgatgagctcccttgctctacaaggatttacaagtagaatcaattaggtggacagttatagctgacagttgacagagagatagttatagatggaggtaggtatagagggagggaggcaaaaagagttaaggaactggacagctgagaactgtctacaggttccaaaaacaagacaaagaaccttttattatctgccaaacaagacagtctacattgagactgctctgcctttcgtttttatgtgtcaaagacacttaaattggcctgtaatcccagcactttgggagaacgaggtgggcggatcacctgaggtcaggagttcaagaccagcctggccaacatggtgaaactccatctctactaaaaaatacaaaaattagccaggcatggtggcgcacacctgtggtcccagctactacggaggctgaggcggggggatcacttgaacctgaaggcagaggttgcagtgagccgagattgtgccactgcactccagcacgggcaacagaacaaagaccctgttaaaaaaaaaaaaaaaaaacttaaatgagtcccaagaaaaaaggaaaaaagaatgaatattgtgatgtgtggggcaagacaagatctagatggtctaaggacaagcaaatctggggaattaacttctgcccatccaaattacaaggaaaacagatgctttgggcaagtgtcgaggaacagtctcatacttaagacaaatgtaggcttacgggctgagaattcttggtgtaaaggttgaaaacggaccttaaacctttacgggacattgacacagagaggtcaaacccgcgcccaggacgcacagtcagtgagaggcagagctgggaagggaacccggagctccaggcatcggctcctccacctccacctgcgctacccggtgcattttctcctccgtgctcactgctggtgttgcctcttggaacctcggcagtttctgctttcgcacctgcagggtttagtctccgggactgcttgggaggacacctggaatgccgaaggcaggactacacaccgggcgaatccaccagcgccaccaagcccttgaaaacccgaggccgccgcgcgactccatttcccagcgccccgcgcggcaggggcttggacgttgccaaggagaccggtagtggccccgcctccacgcagggaaacaggcgggaaccacgtgacccggaaggctgtacgcaagcgtccgcggcgcgcactgggccaatgagaaccgaagggctggacttccggcggtgggactgtcacttcgccgcccgcgtcaggccacaccggtggtctgggctggggaccgcgggtcgggtccggtttccagggggttcctggtgctcgaggctggcggcgaggaaggtactggctgagggcccgcgtcgggcccgccctgcgcacgcgtcgtgatcaagggcgccggccgccggccgcgcccccaagcctctgtttctcagagtgcgtcgtgggcgtccaggggactgtcgggccgcggcgggagccatgcgctctcccaccgtgcggcagcccaggaggctgcgcgctgggcgttccacgtccatgatggccggggagactgaggcgcggggcggccccgggacgctgctggcggggaaaggctgggtggtccacgcctttcttccctcccagctgcgggttccgctggcggcggtggcgctgacaagcccgcgtcggggaagcaggggagtccctgctcacacagaccgcgccctcacggagggaggccgcttcctagacctcgcctagtcgtctttcctctccctgccctgggggggttgcgggggtcagtgcaaactcctgcgtccagggcactggtgagctcccgagttcgggcagccagggggctgaggtcccgaaggaggctccgaggggagagtcctgcgtgtgcaaaacctgggaggggagccgaagcccaggtgcttctgggactgagctctctcgatgtggagctggagtagaggggatgtgtgcggctgcagtatcaggcgagggagtgggctttatctcgagggcgtcgggagacatagaagttttgaacagaatcaggacatcctctgaggactttaaaacggttccaccgtttgttgcgtggagaacagacatgcaggggtgtcggcatgaagggaagaaccgactgccacagtctgggcagcagtggaggtgggcgaccaggtgaattctggtggatctgcggatgcatcaggtgtgggctgtttgaagaactaagtaccccatgttgttcagcctgagcgcctggaagaagagagctgctgtagatagaaaggagaattgaaaggaaagcaggtttccttcaggggaaagatcaagagtctgggatgtcccaggttggtcatgtcactggacctgacgttgttggcgtcctgggctgtggacagggcctatgaattggactgaggaatgggcagggactcagccaggtgtgggcagttatggcttgagggtaaagaagaccagctgggatgcctggggctattgggaagagcctagcacctaactgaggaggggagggtggcaacagagaggggaagaaaggggacaccgggtgaaaggaggaagggattgagttcctctgtgttcacaggttgttgaggctgctcccctgtggcgactggtgagaatcatccagtccctcaggctggatgagcagcctggaaatgtcaggcaagcaggctcagcaggggagggtcccagtgatgggtatgcctgggaagcccctgctgggactcacagtttcttgctacaagagcaggaagggtgcatctggggagggtcatgagtggtcatgctgagtcacgagtggacacctggggctgctcttggtgtggcagctgagggcccagccaggacttgttctagcttgcttgtgtatggcgttgccagtggggaggccaagaaggcatctggggtctggtcagggagggcagaggggaggggtcccagacatgtgagggaagtgccatctgaagatggtgggggcagaacccagggaaggagggtgagtgtctgagggacatcatggaaggtggctgttgggatggggagcttggtcctggctcacagccataccttaaactaagcttgtccaacccactgcccaggatggctttgaatgcagcccaaaacaagttcgtgaactttcttaaaacatgagatgtttatgcaatttttattttttttagctcatcagctgttattagtgttaatgtattttatgtgttgcccaagacaattcttcttccaatgtggcccagggaagccaaaagattggataacccagccttagaccatggctgtctcttcctccctgctcttttaggaccagatggcctttgaggatgtggctgtgtacttctcccaggaggagtgggggctcctggacacagcccagagggccctgtaccgccgcgtgatgctagacaacttcgcacttgtggcctcgctgggtaaggtcctagatactccatgaaatgggcaactgataacaagctgactggccagggctgccccctcacctccctggtggctgacgagcaggcctataccttgcagccaggagccatgtggaataggggtctggtcctatagacatgcagtctggttggctcaaccactccctgtggcgctgtccggctgtggcctctccgagccttggctcagtccccttcctttggtgccctgggcacagttgctgccctggggatgaatgagctattcctgtgagccccttgccctgtgccatctttagattctgcagttgcacagatgacattttctgtttccgtgaagccctgactcctgccctctgtttggaggtgggttatcttgagctggggctggactctaacctgcacctcctcctcacaggactctccacctctcgacctcgtgtggtcatccaactggagcgtggcgaggagccctgggttcccagtggaacggacacaaccctgtccaggaccacctacaggaggcgcaaccctggtgagagggagctcagggtggggtgaattcaggaccaacctgtggtcatgcctctgtccctggttcccagactccccagaagcaccctcctcccctccctcccacccgattcccttcccttccatcatcagcccctcctggaggctgcagccttagctgcccttgaaggtggagctccaagggcacaggagcggggttgacacagaagggcactcaggctatggtgagaccatctcagagtcctgctatcagctgggctggcctcaaaccctccatggctagtcactgccataattgatgggtcatttttttcacccttcatctttgtgttcagcaaacatttcctgagtgctcacagtggtcaggcccagtccaggcaatgtagacacagcctcaatcaggacgaccctggtcctgcttttctggggctcatggtgtggtgggagaggcagtcggtaagcaggattcaggagtatagtctagagcactggatggaggtcattgcaggagcaggttggggagtgggtgcctgagaagggggacaggggcggggggaagggggtaagcaatggaaagagtgtgggtggaatagccagtgtggagatgtatgcagcatacagcagccgctagttttcctcagcttcacatcctgggtgtcggggggctgccaccttgatcatgggagtgcccagtgtagtcagtgccatacctatcagggcagattgttcctccaaaccccagcccctcctgcagggccagcctcacctctacttttcccctaagcttttgtgccagctccggggttccttcttgcctgtccactcagcctgccctggtcctctcctaaccaggatgccccaggcaaccactgtttctctgcctttaggttcctggagtttgacagaggatagagatgtttctggagaatggccacgagctttcccagataccccacctgggatgactactagcgtcttccctgttgccggtgcctgccacagtgtaaaaagcctgcagagacaacggggtgcctccccatctcgggagagaaaacccacgggggtgtcggtgatctactgggagaggctcctgctaggctcaggcagtgggcaagccagcgtcagcctgcgactgacctccccgcttaggcctcccgagggcgtccggcttagagaaaagacactcacagagcatgcgttgctggggaggcagcccaggacgcctgagcggcagaaaccatgtgcacaggaggtccctgggagaacctttgggagcgcccaggacctggaggctgccggcggtcggggacatcaccgaatgggtgcagtttggcaggagcctcatagactcctcggtggccaggagccctcgacctgggacgagctgggcgaggctcttcacgctggggagaagtccttcgaatgcagggcgtgcagcaaagtgttcgtgaagagctccgacctcctcaagcacctacgcacccacaccggggagcggccctacgagtgcgcccagtgcggcaaggccttcagccagacgtcgcacttgacgcagcaccagcgcatccacagcggcgagacgccctacgcgtgccccgtgtgcggcaaggccttccggcatagctcctcgctggtgcggcaccagcgcatccacacggccgagaagtccttccgctgctccgagtgcggcaaggccttcagccacggctccaacctcagccagcaccgcaagatccacgcgggtgggcgtccttatgcttgcgcacagtgtggccgccgcttctgccgcaactcgcacctgatccagcacgagcgtacgcacacaggcgagaagcccttcgtgtgcgcgctctgcggtgctgccttcagccagggctcctcgctctttaagcaccagcgcgtgcacacaggcgagaagcccttcgcctgcccacagtgcggccgcgcctttagccacagctccaacctcacccagcaccagctcctgcacacgggcgagcggcccttccgctgcgtggactgtggcaaggccttcgccaagggcgccgtgctgctcagccaccggcgcattcacacgggcgagaagcccttcgtgtgtacgcagtgtggccgcgccttccgtgagcgcccggccctcttccaccaccagaggatccataccggcgagaagaccgtccggcgatccagggccagcctgcacccccaggccaggtctgttgccggggcatcatcagaaggtgcgccagcgaaggaaaccgagcccactcccgcctcgggcccagccgccgtctcgcagccagcggaggtctgaggtcacaggttgcagccctggccttctgtgaatcccttccacagctaaagggcatatgtcctctgcagatccacagcagagaaaaagtcccgtgcttgctagtcagggacaagggaggccctttggctgtgatttcatttgcacgtggggacaggatttgccagttcacccacagatcacacctccatccccaaagaggtagcactgcagcaacatcagggggaggacgtggtggctgaactctagtggggccgagactattcagagccagtaggaggccgacagtcacagcactgcactgtggtgcggcttcatgtgatatgacagtggatgctaaggtgagagggatgcaggcatgggttgggggtggcccagagaaacttatgacagctgtacacaaactggccgctggagagatgcccgctgagggtattctcccctcaacccactgcctctgttcatccaagacttcctaggggccagcctagcagacaagagaccacaagggactggggatcagggtctgggctctgtcagccgccacctctgggaaagagaaaaggtttgggtccactgaacatcatgtttgtagacgctgacaggtggggtcctaatgagagccaacacatgctcactgccagctcctgtcctgagtactgggaagtttctcctgaagccctgtgagatggctctgtggctggtatcccgacttggaagatgaggaaactgaggcacacggcctggcctggcttcacacacatagccgactcaggagagggatgcccatgggggaacatgtgactctcagcattggaaggacagagctaggatgatggctttccggtggcactcgttcaggtttttgcccaagtctcagcttggccaaggcctgtcactgactggtttaccaaagtcgatgtgaggaggaggctttatacctgaggggatgatgttaacttcagacaagatggagctgctcacttttgccgggtttggtggccacttcacccccaaccctgtctcacccccattatccctcctcaattggaggctggacagagctgaataggaaagacttgctattgcctaaggctatgtgtgacaccctcctgaggacctccccaccccagtgtaatggcccttcatggcagggacagaaaggtggactgggggccatttgcttcctgtggccttcagcagaccaggccctgtccctacctggagcctcacctccaaggaaattcatgttctccttaatggaaaaaaaaaaaaaaagactaccatctgcaactcagagtaggtgttgcagtttcctgtacagcagtttggacctccagagcacagcctcttgtccctactccagagcatggttcagtcttaatagcagttcaagagcttctctgataaaggtttctttttaaacatttgtgtgaacggtagcaacctgacacctatttcaccctcatacaatgcagatggtattgaacataccctgacatgccatcagcgtttgtcatcatcacagaagttcctggacttggcttcaacctgggtaccctcaagaggccacagagtagagatacagcctgtctgcagcccagggagggagtgggatacctgtatccttttcagggtcagaggtgggttggggtagccaggagctggatgaactgggatagagtggggctgtctggagcagcagccctgctagatgagtcctggtggatcctggcaatgggaggatggtaggtggagaaaccaaggcagggctgtgttccttctgctgctgagatagagggtgtggccatgtgtgatgaccctgcaaggttgactccaaccagtgggcactccatcccatggcttccaaaatcctgcagctatcctgccctatacacaaagagcccagatccaggccccacacacttgatattggggccagactcttccacctgtgaaacctcacaggttcctgcagggagtggagacacacagaacctagctcccctggagcctgcaagacttgggccaccagaatcccagtaggtccctgaaccattgtcccccagtaagtctgcagagctgtgaaatgcagacaataacccttccctgcctgaaagagcacttttctggggagcccatgggagtcaggagcaaaagcatctgtcaaacaagtagatacccagagagtcacgtgaaatcatttctatgcctctgacagacgcttcttgagcgaagtttctgccctgagcccgcctgaccccttaggctgggctcagtaccctaccttgtcttcccaccagccgcctccctccatcaagttcctttccacgtctgcttgtgcccctgttgtccctcagtttgtccaccctcctccaatcttcccctccccaaacccatgactgatcagtggcccccaacctaggctcccacctccatgcaggtcttggcccctcggctgacctccctccaacctccccctctgctcttaattttgaataggtagtgactgtaaaagtatccctgggcttctatgtcaaaaggtcagactgaacacatgcatctcactgggctcagaaatccactgaaaccacagaggggagtatttaaaacacataacccacaagtatgaggatggtgacagaggagtcaggagcaatggcattcctaagctagaagtgggtgagagctgtcactaagttagggaaggcaaaatactacgtggcgacttggcgaagaggagagagttcccaccaggctgactccagaaccgcagaaggctgagaaccagcagcccagagacgggagacctatatcaaagctgcctggggaacaactactgaagaagcccttaacgccccagtgctctccccacatggtggagggtgaaagtttttgtttttttttccttctgggactctgcatagtcccagagaaaaggcctaagcacctcatccccaaaaacaacctgaggaggccgttggaaagctccgagttgacaagtctcatccacgcacatgctcggtgcttccaatcggtgatcaagaccactgctcttcatccagagcaggcagcagggattcccaggtatccaaagaaaccaaaacaggcggtgtaatttaggactgactaagtaatggctcggccacttttaagtgtggaagcaaaactgaccccacagatttagaaaactgtaacactgcttattgggagaaactagtgtcaccctggctagttctgctccccaaattcaaaggtaaataaacggttgagcatgtccgatcagcctggagggaaacctccacccccgactttgtaggactgacatctgaagacgtcagagactgcggtcacaaccgtcggtacctccttagggcgcttaacagaggtcaaagatggccctcgcaccctcctggcgggagaaagcccaggctcagggtggtcttctacaccaccgcctctcccgggtccacttggaagcgagtcccagcgaactactcgacctaggaaaccactgggccgccacttccagcctcttcggaagtcgaggcaacgctcctgaacgttgccacgggaacagctggaggcgggcggatatgccctagcgttatctaggggctggcccggggaatggcgtgggggcggcggggccaagcaagcgccacctctgattgggcaaaaccccctcccctcacctgccaatagaaaccggcccactgtacagacgcgcaagtttataacccgggaagagctgctctcagagcggagggagaccatataaccctgggactctgccgtacctcctagaggaacagagcgcctctcaggcgtcagaggctgctgcaaatgcgggtcagcgggtcacggtcgcgcctgtcttgctgatgctcatgggaaatgtagttcaaagggcatgggcggtgccttcggtgcaggcgagagattggtcagcgcggcgtcgccggggcaacacccggctgaggcgccccgcgttgtgcggcgccacatccgggaagcggcctccaagcaaccgctccgggttgaggtgagcgcaggctgccagagtgggcgcagcctttccaccccgtgggagggcttggggtcgccctctggggcctgaacggctcctgctgtcggcgccctggagggcccgcccacttcccgacaggccgcgcgcgtcacctcagccttcgctcaggcctttcctaccctcaacgccgttccggggggccgggcctggcaagtcctcttggaacgcctccctcttgccttccccttttggggacagatcccgaagttcgagcatccctcggataggccgggtgtcaggcctggtctctcaggcccgtccaggtgggcgtctttcactgcagaccttcagggccgggatgctgtggccatccctcgactccgcgcaacgtggagctttggccccgtttttcttggcctttgcttttcgttttcacatgcacgggccccggcagtgtgagtcgcccacggctcgctgtggtcagcgagcacgatgtccacgtgccccctccccagagccattcctaaaggaggtcccacccagtcaacctccccgagattgtggagggcgactcgtccccgtacattacagcctggccccaccttctacccgcccaccctggtccactctcctcgcacctcggctagacactgtggctcctcagcctggcgctggaactctgtgatgactgtctttctccacctctttagcgtcatctcccagcagtcccctgctggacccaactgtttgcaatttccaggaagctccctggacaccttgcgtccaagcatttgtccctgaggcttcctcctgctctcatttgccatcattgtttgggtcctgtgaccctcctccttccatgaagctttcttggccttatctcttctggcctcagagtacacttggtcctggtctcagccccctgggctgagcctggtgtctgccttcccctggccagattctcttggctgacattccgacccttccttttctgtaggcccatcttgacgattccaagaccacccccttgagcaagaatgccatcccctctgggtcccccatgcctgcccgtcatggacccagagaccacccttgaggagcctgagactgcccgcctccgcttccgagggttctgctaccaggaggtggcaggtccccgagaagccctggcccggctgcgtgagctgtgttgccagtggctgcagcctgaggcacactccaaggagcagatgctggagatgctggtgctggagcagttcctgggcacactgcctcccgagatccaggcctgggtgcgcggtcagcggccaggcagtcctgaggaggccgctgccctagtcgaaggactgcagcatgaccctgggcaactgttgggctgggtgagtgtggctggcatcagcttcttggagggatagaccctggctagagccattgtgacctacctcttctcctcagatcacagcccatgtcctgaagcaggaggtgctccctgcagcccagaagacagaggaaccacttgggagcccccacccctcagggacagtggagtcccctggggaaggtccccaggacaccagaatagaggggtctgtccagctcagctgcagtgtgaaggaggagcccaatgtcgatggacaggaagtgggtgaggttggggtcccaccagagatgagggactcctggaggaagtgtggacattcctggctagggtgggagtcccaggagaggtgtgtcaaggctgggactcctgaagtgaatgtggatgtccctgtctgggatggggacctgggaggcaggagccaagggctggctacgtgccatgtcacacagcagaggagctcctcatctgccatggctcatgtgggcagcccctgacaccacccttccatctgccccacttttcagcaccctccagccctccacttgcagcacagtcccctgaggggaaccatggacaccaagaaccagcctccacatccttccacccacccaggattcaggtgagcagccccaagtgggaagtataggccccaggtgtgagaagggactgtccccatggctgccctctgcctggtggttttccaggctccttgactagtggctctttgcttcccagaagtggagtctgtaaaagctgtacccctccacaggacctggggcagagggacagactggtgatctattattgaaaaggatttggggctggacatggtggcttacacctgtaatcctagcactttgggaggctgaggtgagcggatcacctgaggtcaggagctcgagaccagcctgaccaatgtggtgaaaccctgtatctactaaagatacaaaaattagccagaagtggtggcaggcgcctgtaatcccagctactagggagggtgaggcaggacaattgcttgaacccaggaggcagaggatgcagtgagccgagattgtgccactgcgctccagcctggtcaacaagagcaaaattgtgtgtcaaaaacaaaaaaaaaaaaaaggatttgggcctcaagccatggaaacccagtttagagtggctggaactagtgggcttggcttcctcacctccagagaagtcagctgggaggtttgctgctcccagaggtcctgagccagacctggggatttgaacttttgtgtgtagctggggaggggagaagatgaccagctgtggcaggactccccccacacctgagaccagatggagacactctccctgggaaatgcccgaagtcccttctctcctaggggtttcttcagaggccacctgttaggcctggaagctcagcttgaggcctcttctacctggatcgcttggttcccaagtgtgggtagcaaggtcttttcctctcccggctcctctaacaactccactggggagcttcagcagcaacattgctggttgagatgtgtttcgaggctaagaagtccttccaggctccctccacagccccatggcacagtcagaaagtgaggcagggtgggtaggctgcacttcccagtgtcctcacctccagccagcaccatctctagctgtggctcctcacagctgccgccttcctgcccctggacttgccacagcttgtccctcaggattatttttcccaacccagcaaagccccagatgatgggactcaggcagcaaggagggctgacccccaatcagggagttcattcctcgataaagtcactcaggtccctgtgatgctgccaaacctgccctctgagcaggatggtgtagtagagggggatgagtgctggcagcagcactggtcaggtgatctgaaggagaacctctgcacttaacaaacacacaccttgagatcattctcagcaggaggggcagatgaggcgtaggtaacctgctgactcttccgggtaataggtaagaatgtgaaccagacagggcagggaaggggtggaaagacgcctacagtgatgggccacatccgcaggaggagtgggggctgctggaccggtcacagaaggaactgtactgggatgcgatgctggagaagtacggcacagtggtctccctgggtgaggaccagccagccccaccccgcccctctccctggggcctgcacccaccctgcagcaggcctagctgggcagggcctctgtgctaccagccctacccagctctcccaccttccagaggaacaccctgtcacctaccagaaccgaccccacccctccttcatgcaaaccccatgcctaactgtgccccccacccgggcagggttaccgccccaccagccagaggcacaggcccagtcagagctggggatgctgctcacggggacaggcgtctgcagaagcctgcgctcgggtgagtgccccacaccatccagcctgaatcacccctcctgtatcggtgggacctgagccacccactcatggggggacgggagcttgtgccacggccacaagcctgagggaggggttgctgagtgccgggactcacctggtttgcccctgcccccaggaaatgagagtgagggtccacctggctgcccagaggcccagccgccccagggcccagggccggcagcctgggagggcttgtctggggctgccactcctgcccccactgtgcgcccagggacaccgccagtgcccactcagcccacacctgcagagacgagactggagccggctgccacccccaggaagccctacacgtgcgagcagtgtggccgcggcttcgactggaagtcagtgttcgtcatccaccaccggacacacacgagtgggccaggtgtgcagtccccggggctagccaccggggaaagcacagagaagccaccacaaggggaggtggcctttccgcaccacccccgacgctcactcacaggcccccggagttacccgtgtgaggagtgcgggtgcagcttcagctggaagtcgcagctggtcatccaccgcaagagccacacaggccagcggcgtcacttctgcagtgactgtggccgcgccttcgactggaagtcgcagctggtcatccaccgcaagggccaccggccggaggttccatgagcagccagacagcacagtccctcggggcctcggtgttctcggggcctggatacagcctctggggcaccagcagaagactctggaggcagcaggggatgccagagtgaacaaggggtcccaagccagttccctgcccctggtctggtctcccccaaaagacctgggtgcaaggaaaaggagctgctctctctcttcttgcccctgcctcctagagggaggtctgggttcccttctatggctgaccagtgcctgtggggtgactgccaagcaccaggctccctccctccctgtgacatggcctgggctgacaacactccctctcctgggacctccttgcctcaggtgggtgttcaaaaactgtgccttcccactcgtctgtgcagaggctgggcctgaggtctcagtgtggagagcagcagaagacccaggaaagcacagttggcttccgtttctcctgctccctgtgtgtgttagaattttaacataaattccactttcataatatggagtttctgaataagaatcctgatttctggcttctgctggtcgggaaataggcagtttgctgtctctgcccagtagctgcagcacagggcagttgagcccagaacggccaaacctctgttgccacagaacccaggtcccaggtccccagcctcccttgctccttgccgcccacatcactcaccagcctcactggccttggaactcatcagtcccggcttgagagacacaaaggggatttcctttcgaagtacggctggacaagggggacctctgagaagaggggctgcaagcaggggttgcgccaaggccatgggtacttctaggtcaggccgcaccctccatagttagctggtcatgcagcaggaaggcaaaaggtcagctccctgggaagcaccggatctctgggcagtcactggggactcgccaatgcactgtattagttttctgttgctgctttaacaaacttggcagcttgaaacaacagattctcttatagctctgaaggtcagaactctgacatgggtcccactgggctaaaatcaaggttttgttttgttttgttttgttttgttttgtctgagatggagtctcgctcagttgcccaggctgcagtgcggtggcacaatctcggctcactgcaagctctgcctcccgggttcacgccattctcctgcctcaacctcctgagtagctgggactacagacacccgccaccacgcccggctaatttttttgcatttttagtagagacggggtttcaccgtgttagccaggatggtctcgatctcctgacctcgtgatccacccacctcggcctcccaaagtgctgggattacaggcgtgagccaccgcgcccggccaaaatcaaggttttaacaggactggttcctcttgaaggctctaggagagaataatccattttgttgccttttccagcttctagagtcagcccacgttcccccttttttttttcttggtccattcctccgtcttcaaagccagccatggttggtcacgtcttccttaggctgccagctctctgacacccatcgatcctttggcctccttaaggaccctcatcatatcttgtcccctacctgcacacttagtcacaccgcagagtcccttttgccaattgagatgttcacagcttctggggattggaatggggactccttgggggccttgattcagcactcttctccttcctactctgaaaacaaggggcattttcacaggggatggtttcaggaaatgggtgccctctcggaaggagccctcgccagctgctggtatgtgcagcatgtgcacaagtcgcaggtggatgttgagggtagctgcgactgtggttaccccaggaggggctccctgggaggggcaggaaccctgctgcggcctgaagctgggagagggaggctctcctcagaggcccatcttccccatccccttttatgagggccttctaacccgttgctcccatgtgcagggctccggaagcagggccagtttggagatggagctgggggtgggtgatctgtgagcaagcaggaggcgagagctgtgctggggacagagaagaagaagacagagcagtacccaggggctccagctaggccccagcccagaagggagagtcagggtatagaaggctgtgaaagggccagatcatgcaagaaaagctgcagggggtgagggcagtttttaaataaactttttcacatttagaagcaatttatgctcacttagaaaaatttgaaatacacaagatggcaaagaagatcatgaaaatgttccctaattcaactgtctcatggcaatgcttactccagaagtttacatatagaagtggttgaatgtaaagtttcttttaaggcaacttatgttgtttcactttgggagaccacgagttcaagaccaatctgggcaacatagtgagaccttgtctccaaaaaaaaaaaaaaattaaaaataatagtaggctgggtgtggtggctcatgcctatattcccagcactttgggagaccaaggcaggtggaccacttggagttcgacaccagcctggccaacatggtgaaacctcaactgtactaaaaaaaatacaaaaattagccaggtatggtgacatgcacctgtagtcccagttacttgggaggctgaggaataagaatcacttgaacccgggaggcagagctgcagtgggccaagacggcgccactgcactgcagcctgggtgacaaagcgagaccctgtctcaaaaataatactactactaattagccaggcatagtggcgcatacctgtagtcccagggagactgaggtgggagaatcacttgagcccaggaggttaaggctgcagtgagctctgataacaccattgcactccagcctgggcaacaggatgagaccctgtctggaaaaaaaaaatacggaaatgggagacggaagggtaggtcagagagagggatgatggatgaaataactgcaaatattcacaataggagagggatgaccccaccatatggaatgcttcacaaatttgtgtttacccttgcacaggggccattctaatcattccaattttagtgtatgtactatagaagtgagcgagcagttaacttttttcttttcatgcctggatgaatctattttctggctggcaccatcatttctaccaagaccaaagaatttcttgttccctcctcaccctgcagtacccagtgctatgattaattctcttgagtaaacacttggatactactgtggctatttctgtagtataaatttctcaaaatgggattggtgagttacagggaacatgagatttatttttgccttaaaacagcaaaaacttattgtacaattctggagaccggaagttagacaccatctcaccaagctaatactagagtgttggcaatggctgggcacagtggttcactcctgtaatcccagcactttgagaggctgaggcaggaggatcacttgaggccaagactttgagaccagcctgggcaacagagtgagaccccatctctaaaaaaaaaaaaaaaaaaaaaaacacacaattaaaaaaaatttttttagctgggtgtggtagtgcacacctgtagtcccagctacttggaaggctgaggcaggaggatcacttgagtccaggaggttgaggctacagtgagccaagatctcacgactgcactccagcctgggcaacagggcgagactccatctcaaaaaaaaaaaaaaaaagtgttggcagggctgcattccttctgtaaacactagggggaaaattgttctgtagctcatggccccttcccccatgtggtggctcacacctgtaagcccagcactttgggaggcaaaggcgggcggactgcttgagcccaagagttcaagaccagcctgggcaacatagcaagaccatgtctctactttttttcgataaaattttttttaaaaaattttaaaaaccaatcagccaattttccccaagttaatctataaagtaaatgaaatgcaaataaaatataccacatttcagccgggtgcagtggttcactcctgtaattccagcactttgggaggccaaggcagggagattgcttgagcccaggaattcaagaccagcttgggcaacatggtgaaactccatctctagtaaaaatacaaaaattagccaggtgtggtggtgcacgcctgttgtcccaactactcgggaggctgaggcaggaggatcacctgagccttgggaggcagaggctgcagtgagccatgatcgtgccagccggagcaacagagtgagaccctgtctcagaaaaataaaaagaagcacattttatatgatccaacaaaaagattctaaaatgcatgtggaaaagtccaagaattgctaagacaatttggaaaaaacgacaagtagggaagaattgtcatattgtaaataaaaacactgttaagttatataatattaaaatagtgtggtggctgggcacggtggctcatgtgtataatcccagcactttgggaggccgaggcgggtggatcacctgaggttggagttcaagactagcctggccaacatggtgaaagcccgtctctactaaaaatacaaaaaaaaaaaaaaattagccgggtatagtggcacacgcctgtaatcccagctactcgggaggctgagacaagagaatcacttgaacccagaaggcagagattgcagtgagctgagatcatgccactgcactccagcctgggtgacagagtgagactccatctcaaaaaaataaaatattgtggtattggcacaggagtggacaactaggtcaatctaggaacagaccttttggaacttgatatacatgaaatgactcaaccaatcagtgaagacagggtggatgttcactgaatattggagaaaactgaactcccccatacaaaagaaaacagatttccactttacacacactcaaaattaaattccagattaaatactaggatatttttaatgatttattaaatttttttttggtagagacagggtctcaatatgttgctcagcctagtgtcaaactcctagcctcaagcaatcctcccttctctacttctcaaattgctgggattacaggctgagccaccacacccagcctgatatttatttttaaatatcaggaaaatgtaaaactttgttttgtttttgtttgttttgagacagagtctcgctctgtcacccggggtgaagtgtagtgtgaacatggctcactgcagccttgacctcctgggcacaagcagtcctctcacctcagcctcctgagtagctgggaccacaggcacatgccaccacactcagctaactttctttttttttttttttttttttttgagatggagtcttactctgtcacccaggctggaatgcagtggtgtgatctcggctcactgcaacctccgactcatgggttcaagtgattctcctgcatcagcctcccgatagctgagactacaggcacgtgccaccacgcctggctactttttgtatttttagtagatggggtttcaccatgttagccaggatggtctcaatctcctgacctcgtgatccacctcggcctcccaaagtgctgggattgcaggcatgacccaccattcctggcccacactcagctaactttcagtttttgtttgtttgttttttgagacgaagtctcgctcttattccccaagctggagtgcaatggggtaatctcggctcactgcaacctccgcctcctgggttcaagcgattctcctgcctcagcctcccgagtagctgggattacaggcccccgccaccgcacccggctaatttttgtatttttagtagaggcggggtttcaccatgttggccaggctggtctcaaactcctgacctcaggtgatccgcccacctcggcctccccaaagtgctgggattacaggcgtgagccaccgcacccagcttttttttttgggggggggcggggagagatgaggtctcgccatgttgcccaggctgaaagtaaaaattttatgacctcaagagttgaaaatgatttcttctttttatttttttgagacggagtctcactctgtcgcccgggctagagtgcagtggtgcgatcttggctcactgcaagctccgcctcctgggttcacgccattctcctgcctcagcctcctgagtagctgggactacaggtgcccgccaccacacccagctaatttttgtattttagtagagacggggtttcaccgtgttagccaggatggtctgaccttgtgatccgtccacctcggcctcccaaagtgctgggattacaggcgtgagccactgcgcctggccgaaaatgatttcttaaataataacacaaaaagtatacagacccctaaaaccctgccaataacaagtattggttaggcagcacagaacaggacctgtgaatttgatgagttatcactcctgtgatttgatgatgtcatatggcatagttgcccttgttttgttttgctttgttttgttgagacagggtctcatttgttgcccaggctgcagtgcagtggtgaaaccataggtcactgcaacccggaactcctagtctcgagcaatctgtccatctctgcctcacgactaaagaaacaactggcaagtttaataaatcgaacttaaatctctgaaaagacactgtaaacataaataaaagataagcaaaatattggaggaaaacataaaccaaaaaaaccctcgacaaacccagaaggtatttttaaactccaaataagtccaggcgcggtggctcacgcctgtaatcccagcactttgggaggtcgaggcagggggatcacttgaggtcaggagttcaagaccagcctggccaacatggtaaaaccccgtctctactaaaaatataaaaattagccagccgtgatggtgggcgcctgtaatcccagctactcaggaggctgagacaggagaatctcatcaacccaggaggtggaggttgcagtgagccgagatcacgccactgtactccagcctgggcaacagagcaagactctatctcaaaaaacaaattaactacaaataaatatgaataggactaaaatatgatagaaacatggagaaaggccataaggcaggaatacacatcagaagaaactaggctgatagaccagaaagaaaatatgcttagcattacatgcctagcagtaatcagagaaaccccagcactgtgaggacagggcttcacctgccttgctcatggccacacaccctgttcatggcactgtgagggcaggacttcacctgccttgcccgtgaccacacaccctgttcatggcactgtgagggcaggacttcacctgccttgcccgtgaccacacaccctgttcatggcactgtgagggcaggacttcacctgccttgcccgtgaccacacaccctgttcatggcactgtgaggacaggtcttcacctgccttgctcgtggccacacaccctgttcatggcactgtgaggacagggcttcacctgccttgctcgtggccacacaccctgttcatggcactgtgagggcagggcttcacctgccttgctcgtggccacacaccttgttcatggcactgtgaggacagggcttcacctgccttgctcgtggccacacaccctgttcatagcactggttggtattcgtagcattgtcaacaaaccagatacacatcaatataacgtgatggatttctcagccttcaaaatagcaagttaaaaaccctgccaattaaaagaaaaggcataaacatgactatgataaaaaaaaaaaaaaaaaggctgggtgcggtggctcacacctgtaatcccagcactttgggaggccgaggcaggtggatcatgaggtcaggagattgagaccatcctggctaacatggtggaaccccgtctctactaaaaatacaaaaaattagccgagcttggtagcaggcacctgtagtcccagctacttgggaggctgaggcaggagaatggcgtgaacccaggaggtggagcttgcggtgagccaagatcacgccactgcactccagcctgggtgacagagcaagactccgtcaaaaaaaaaaaaaaaacaaaaaaatacaaagtgccaatagcaggtattggtgaggaaatgaataccaggacctgtgcatatgatgagctactgaaactgcctttgcaaaattatgactaagacagtgaaagagatctgactaaatcaattccatcttgcttctaacctctaagctgtcctagttcattcttgggcataggctgaagtaactttgagagaaacttatagttcataaccttatggtttatagtttaaaacacagaggataacagccctttcccaaagcagacctccttcttgcctggggaccagatggcctttgtaggactaacattagccccaagattagaaactctggtttaggagtcacgcagctggaggctagaagattctgaccctccctcaactgctcctaagatcagcgcttgggatattttgcagactctgcacttgatggatcagctggccccacccagatccataaaatggctcatctgatcttgtggcccccaggaactgactccgcgcaagacgacagcttcgactctgtatgatctcatccctgaccaatcagcactcctggctcactggcttcccccaacccaccaagttgtccttaaaaactctgctccctgaatgctcagggagactgatctgagtgataacaaaacccttgtctcccgcacagctggctctgcgtgaattaccctttctctactgtaattcccccgtcttgagaaatcagctgtgtccaggcagcaggaaaggtgaacccactgggcagttacgctaccaatcctgtgatatgattgtgtcacatggcatggttgcccttttttctttttgacagtcttgctgtcactcaaactggagtgtggtggcgcgatctcggctgactgcaacctccgcctcccaggttcaagcaattcttgtgcctcagcctcccaagaagctggagtacaggcccacgccaccacgcctggctaatttttgtatttttagcagaggtggggtttcaccatgttggccaggctggtcttgaactcctggccttggcctctcaaagtgctgggattacaggcatgagccaccgcaccagccgtagttttgttttcttgagacaatctcactctgtcacccaggctggagcaaagtggtagagtcatagctccctgcaacctagaactcctgggctcaagtgaccctcccacttcagcctccccagtagctaggacaacaggcacgtgccaccagacctcgccttttttttttttttttttttttgagacagagtcttgctgtgctgtccaggatggtctcaaatttctggcctcaagtcatcctcctgcctcagccttccaaagctctcagattataggcatgagccaccatacctggccccatagttgaacttaaaatagactatatgattatctgggggtgtgggggggctgatctagctacatgatcccttttaaaacatggagctcttggcgggcatagtggctcacacctgtaatcccagcactttgaaaggccgaggcagtcggatcacccgaggtggtcggatcacccaagatctataatttgagaccagcctggccaacagggcaaaaactcatttccgctaaaaatacaaaaattagccgggcatggtggcacgtgcctgtaatcccagctacttgggaggctgaggcaggagaattgcttgaacccgggaggcggaagttgcagtgagccgagatcatgccactgcaccctagcctgcgtgacagagcaagactccatcttggaaaaaaaaaatacaaaaattaggccaagcgcagtggctcacgcctgtaatcccagcactttgggaggtcgaggcgggtggatcacgaggtcaggagatcgagaccatcctggccaacatggtgaaaccccatctctactaaaaataaaaaaattagccaggcgtggtggtggacgcctgcaatcccagctactcaggaggctgaggcaggagaatcgcttgaacctgggaggtggaggttgcagtgagctgagatcatgccactgcactccatcctgagcaacagagcaagactctgtctcaaaaaaagagaaatgcctatttttattttttttgagacagagtcttgctgtgtcgcccaggctggagtgcagtggcatgatcttggctcagcgcgacttccacctcccagattcaagcaattctcctgcctcagactcccaagtagctgggattacaagcacaggccaccacgcccggctaatttttatatttttagtagagatggggttttgccctgttggccgggctggtctcaaactcctggcctcaagggatctgtctgcctcaccttaccaaagtgttgggattacaggcgtgagccaccactcccggccccatacatttattttaaagtaaatttccacatcttgcaataataaaataaacagtatttcaagtcaccttaaaatagataatgtctacattaatagatgttcatccacacagccccgtttatcacctggaaccatacttgagaagtcctgcctaccagtgtccatcaccagctccattcctctgtagttggtgccatctgcaagaatcgagccccttcctggggtttgcacaggctgcagcctcctcctactacagcagatgccaaagggcactgggcatggtgtgggggtcagttcactttcacacagggcttgtgttttccgtggtctcggcaacaccaacagtgtctgaacatgactgcacagacattggtgcccgccgctgcttgtgagctccaagaccatctctccttctgtgggtgccccacttatctcactttttgacccctccccaggtctctggaaccctctcttcagtcttgacttcctgctggcctgtctggaccaggtctgtcagtcctactccccagcaccagatgggccctaagaatccccctcctgccacacctgctatttcctcatatccagcctctcaggctacgatcaccacgccacccttccagaaggttccttccaaccgcccttccgaaaaggccctctccatggccctcttgtcaatgactcactcccagcatggacagcagagacgtgacccacacctctaacccatgaggctctgcccagccctccctggacatgtcagaaaacagagagaccctagtcactgtgggtccagaggcaggaccagcagccacgtccatgccttttcagagcaccctcaccagggtaaggcaagttctagcaaggcagagagggatctgtgtgaggaggtacctctcattaccaccactgttaatcatcattgacttattcattcatagagaaaaagtcatcttgaaccatcaaacccgagagcataatgtcggatacggaaagtcggtgggagaagtcatctgtcattaggggtgggagcggggaacttaacacgggcatccaggaaaaggcaggatgagaagaaaccgtggacttggtaaagtctgtaagaaacgtcaccatctgagccatcgctacagcatctgcctgtatttctcacatgcttacatgaaaggcattatttattcacttggacaacaaaggctgcttttcgtgagagtcactggtcctcccatgagggcatccaccgatacttcaagaatccttcctggggccgggcacagtggctcacgcctgtaatcccagcactctgggaggctaaggggggggcggatcacgaggtcaagagatcgagaccatcctgggtaacacggtgaaacctcgtctgtactaaaaaatacaaaaaaaaaaaaattagccaggcgtggtggcgggcgcctgtagtcccagctactcaggaggctgaggcaggagaatggcgtgaacctgggaggcggagcttgcagtgagccgagattgcgccactgcactccagcctgggagacagagctagactccatctcaaaaaaaaaaaaaaaaaaaaaaaaaaaggaagaaagaaagaaagaaacaatccttcctaggacagtgaatcactcctataatcccagcactttgggaagctgaagcaagacgatcgcttaagcccaggagttcgagaccagcctgggtaacacagtaagatcccaactctacaaaagaaaatatgttttttttaattagcaaggcatgatggtgcatgcctgcagccccagctactgggggggatcacttgagcctaggaggtcaagggtgcagtgagcgatgatggtgccactgcactccagcctgggtgacagagcgagaccctatctcaaaaaagaaaaaaaaaaacaaaaaaaccagtccccacactagcagccacccataagaatataaagaaagcatggtgccctccaccaccttttacttctatacctaaccagcaattttggggggaaaagacataaatgggaaagagttctgacacatgactagctaagaaggttttgaaataaaagtaaagagtaggaattccgccaggtgcagtggctcacacctgtaatcccagcactttgggaggccgaggcaggtggatcacctgaggtcaggggttcgagaccagcccggccaacatggtgaaactccatctctactaaaaatacaaaaattagccaggagtggcggcatacacctataatcccagctactcaggaggctgaggtgggggaatcgcttcaacttgggaggcagaggttgcggtgaactgagatcaagccactgcactccagcttggacaacagagagagactccttctcaaaaaaaaaaaaaaaaaaaaaaaaagagagaaagaaaaagaaaaaaaaaaaaaaaaaaaaaatatatatatatatatatatatatatatatatatatattacaagcctatgctaattacagcagcttgggacaggagaaacagaaagacttatagaatgaaattaagaatacgctgggtgtggtggctcacgcctgtcatcccagcacgttgggaggccaaggcgggcagatcacctgaggtcaggagttcgagaccagcctggccaacatagtgaaaccccatctctaccaaaaaaatgcaaaaattagctgagcctggtggcacatgcctgtaatcccacctactcaggaggctgagacaggagcatcacttgaacctgggaggcagaggttgcagtgagcccagattgtgcaactgtactccagcctgggtgacagagtgagactacgtctcaaaaaaaaaaaaaaaaaagggtgcagtggctcacacctgtaaccccagcactttgggaggccgacgtgggtggatcacgaggtcaagagttcaagaccagcctggtcaagatggtgaaaccccgtctctactaaaaatacaaaaattagtcaggtgtggtagtgtgtgcctgtaatcccagctactcaggaggctgaggcaggagaatcacttggttccgggaggcggagtttgcagtgagccaagatagtgccactgcactccagcctaggcaacaagagtgagactccatctcaaaaaaaaaaaaaaaaaaaaagaagaataaaatgtgtgtcaccagcccccagcacatcccctccacaatagtagagtgtagggtagggctctgcctgctcatttcgccccaggaggccaaccctccctgatagtccaggatatttttggaaaaaaaaaaaaaaggtgcttttccgtctccccaagatcctcaagttcaactagacatttcctatataaatgttttgttctgcctgttcattttggtgggtgcccttttctcccttccccaccacccgtgctcctcccagtctgcccctggcctccagccctgaggatcagttgaggtagggtccctggtattccgtaccctcctccctttgtttctgttggttgtcactcctgctgaatgtattgctttttaatactgtactgcaggttttttttaaataaaattgtttggaaagtaaaagagaaaaggaataacgtgtgtgatatattgaataaaaaacacttcatagatctgtagtctagtgggggaataagaaaaagttttaaaatttttatttattttagagacagggtcctgcctctgttgcccaggctggatggagtgcagcagcacaatgatagctcactgttacctcaaactcctgggcttaagccatcctcctgcctcagcctgcccagtagctaggactaaaggtgcacaataccactcctggctaatttttttacttttaattttttttctagagacgtggtctcactatgttgcccaggctgatcttgacctcctagggtgaagtggtcctccgaccctggcctcccaaagtgctaggattacaagcatgagccactgcacccagccaaaaattatattattatttaaatttatttatttatttatttttattttattttttgagacggagtctcgctctgtcgccaggctggagtgtagtggtgcaatctcagctcactgcaacctctgcctccccagctcaagagattctcctgcctcaccctcccgagtagctgggactacaggcatccgccaccacacccagctaattttttgtatttttagtagagacggggtttcaccatgttggccaggctggtctcgatctcttgacctcatgatccacccaccttggcctcccaaagtgctgggatttcaggcctgagccaccgcgcccgcctatttattttttctgagacggagtcttgccctgtcacccaggctgcagtgcaatggcgccatctcagctcactgcaacttttaccttctgagttcaagtgattctcctgcctcagcctcctgagtagctgggattacaggcatgcaccaccacacctggctaattttttgtatttttagtagagacggggtttcactatgttggccaggctggtctcaaactcctgacctcatgatccactcacctcggcttcccaaagtgctgggattacaggcgtcagccactgcacccagcctcaaaaattattattattattttgagacagactctcagctctgttgcctaaagtggagtgcagtggtgcaatcttggctcactacaacctccacctcccaagttcaagcgattctcctgcttcagcctcctgagtagctgggattacaggtgcataccaccacacccagctaatcaaatattattttttaatccttgcaaatgtaatagcaaaaactatgaatgccccaagctagctagggcttagggaggcacggatttgtataaagtgctggtgaacttgtaaagctgaggatccacagtgagatatttctacaacatccacaccctctgatccaacacctgcaacaatgggcttggcaagtaactcatggggaaagcacctctcttggctggggcttcctcaactatggtgggagcaacacaacacaactcatcccatgagatgtggtgaagatatcagctctaggccaggcacagtggctcacacctgtaatcccagcactctgggaggccgaggtgggaggatcatgaggtcaggagatctagaccatcctggctaacacggtgaaaccccctctctactaaaaatacaaaaagaaagccgggcgtggtggcgggcacctgtagtcccagctactcaggaggctgaggcaggagagtggcatgaacccgggaggcggagcttgcagtgagctgagattgcaccattgcaccacagcctcggtgatagagcgagactctgtctcaaaaaaaaaaaaagtatcagctctagcctggccccaggtgagtccacaagggttattcttctttttttcccactatactaacaaggacgtgagggttcttttttttttttttttttttttttgagacggagtctcactctgtcacccaggctggaggagtatgaaggaactggacaacctactgtgtgcgtgggaggatccaagtccagttgtatgaaagggccagggctcttcagggaacatgtggggctccactggccacacagggcacagaaatagcaagtcacaacaactatcacttcgcagaagagaattacagtgcacggccaccaccaatgacaaacagatgctcatagtgggaccccaactgaaaaggatactgtctcagctccaggctgcagggctgacaggaagagcctcgaatgctaccaggaactctgtgaagcccagctgcctcacagcccacgtggggtgctgcctgcactgctcccttcgaaggctagttctgtctcaaagtggcccatagcctgatgaggaggctgaggcacgggagagcacagtattgtgccaaacccctactgactccaatggggacggcaccaggttcaagaggccgaagaagagactaagagccagcaaacaagatgtagggttttactgggggcttacataccggggagagtccaggggcggtgggctgggcaggagaaccacttgcaaaaagcatgcagtttatatggcattttcacttaacatcctccccctggcaaccttcatttaactgaaagcaaaaggccaggatcccttataccaccagcattccatgggacagggctaaggacccagatgttcctcaaaaataaggaatgaatctctgagattccttagctgggaactctgaaccacactcaggtgcgtctgccacacagggccattctcaggtgtgcttaagcattgctgtggggtgtgtttactatgcacacgagaagggatgggcagggtcgcagtctgcagcactgcccacggacagccctttgcatatggcgtttactgctgtggggttccttttctcaccatcatcaccccagctgtgctcccaaagttaacccatggaccaccggcctggcaccaccacaactgttccagtgtctgtagcctcaccttcagttcctactgggccgagaagccttggaggcagaggctcagcacccacacacccccacctacatctccactaggcttcgggtagcaggtccaactcctgagactgtgcagactcccattttccagaggcctctgctcccactgctccccacctacaaagcttgccccagggcctctacacgtgccgttcacagtgccagggacactcctcccccagttacctcctgcttgcccttctagcctcagtccagcaacctccaggctttgtcagattgtgtatccacagcacttcacaggggagttatccacatccactggcccagccaccgcctcagtggcccaccaaagacccacagatgagaatcagagttctcatctctctacctcagagcagctgcgaggctggccagctcctcccacacccttggcgttacacagacagggtcatcccacagggatggctgaggttctttgctgggagacagggaagaccctaaaataaggtcttcagggcactagcccctgcactcctccattgctccttcatccacgcagacatacagacttctgtgaacacatctgagtttattctgccactgctacagggcccactgtcatttccagcccactgaggttgagggtatggccaggctgggattcacacaggcccaggatgaaagggacaccgagtgtgttggggtgggggtggctggctttgatccctaccccagtgggttggccaggtgatcagagcctccaggttccctcacacacagcctggtacatttctgccgtcaggggccggaaggactgggcccggttgtccagtacaaacagagggtcaaccacgatccccacattgaagccctcacgcaccaaccgggtcttcatcagtttgaacgtgctggtgacctccatggcgtcctgcagggcagtgaccatggtccaatcactgtgacatccacccgccccctggctatgatcttccacccacccaccaggccaccctgggctcacctggatgcggatgaaatggggggtagcgtaggcagggagccaagcgcgaacgtgctggtacaacttctccccgtcgaaagtctggccgggggctagctgcacagcagccatgcccaccttaccctcacaacctagagagcagtctggtcactctcggctgacccatctcgagggcccatagctgaccctccagcctcgcccagctctgctcactggctgtgagagccagcaagtctctaaacctctctgggccctagcacttccccacctgtaaaatcagaataacgacccctccacccacaaagctgttggaagtttaaaatgagaaccctccgcacctggcacgcacacgccatacacgttaacctgttgcaagaagtccacctgcgacaacacgccctccacctcgtgcgtggacacgttctcgcccttccatctgcaaggagggagccggcgcttgtgaccacgcccccgggaaggagaggccccgcctcttgcccccgccccgccccttttggggatcaggaggcccagtcagccccgccccctcgaaaatcgagaagccccgccttcgcgtgagaagtcctgactccaagttccgccctcttacgacaggaaagtcccgcctcttcagcctgactccctctaggatctgaaagcgtccgtggccccgcgccagccccgccccgagaaaccctgcctcggaccggaaggtgtccccgaggcggtcgcggaagtagaggaagccttcgcggtccatggccagtacgtccccggtgttgtagtaaacgtcgcccgattgccgcacgttgcgcaccagcttccgttccgacagctctcgggggccgcggtagcccacgaagggttgctggcttaccaccttggtcagcagcagccccggctcccctggggtaggagcaggaacaagaacccctggagcccaccagccaagccccctgctggaggttttcaacaacggtggactcttcatcacccagcaccctgccaaggacagacccaaagacacagacagggagatccagagatgagagagacattcagagaccttgagagactgcgacaagcgacacagaaaatgagagagaagtatagagaaggcggtatggggagcccatgagaaacaggaaaaggataacaagggatggaagacggacagacaaatggcagtgagaatagatatgaccaggaccttgcaaggccctgggagaagacactaacagaaggtacaggacaagggaccaatggctggaatgccgtcttccacagaaagctcaagagaacaaatcagatggacacccagagacccagtaaatcagagcaagagatcaaggcaggggagctggacagagccgagaagctgaggcggaggccccagatggtggtaaggcaggccactggctcagggtccagatgaaggctgcagacccctctagtgagcaccaacgtcaagcttttgagcagctcgttccagccaagcagaagactgagggtcgccacccctgccacccaggaaaggctcctcaacccccatacctagccctacagggatgcagaagccctgattgtccctcacaggctccgccgcctccatgtcgaactgcaccagctcaaagggggacagcatctggggtggagggtggagtgttgacataggtcctgtgggctcagcctcagggcagctgcacaccaggtacccgcacactcactcggaggaggcagctcatcttgcccagggccccgcagcgccccacatagttgactaagcccatgttgccttctgtggagccgtagacttcccagatccgaataggaccgaagcgctgctggaaggtctcccacacatcagcccgtagtccattgcccattgccaggcggactgtatgtgtccggtcctctggttgctacaggaatgtccccagaagggtgaggaggaggtgctcttggggcatgccttggaacctttacctagagggggtgttatcctgggtccttaccttgggagttacctggaaggtgatgggggacctctacctaagggatctacctgggttacttacatgagagtagttactggagtcttaaatagagggttacctgcaggggcgacctcagagctttgcctgggggacgttaccagaggtgactggaggcctcatctggggtctcacctaagagtagttacctagaactttaatttaatggaaatttaattttaattaattaatttttaatggaaattctcatgataggggtaggggctattatccctgttttccaaatgaggacactgaggctcaaggtagcacagctatcaaagaaaccattattggaagccttgtctgaaactcattatctggggttcttgcatgaggtgtattatctgagggacttgagttcagtacctgaatctttacctgagacctttacctgggatttcatacttgggtgttcaccatggagccctaatcttagagcctcacctggggaatgttacacaagtaccgcaggagctcgcccacatacaggatcactgtcacgccatgctgccgacagtcatcccagaagcaggaagtagagaacttgggggccagaacacaggtggctcctgggagatgacaggagagggggtttcaggtcatgcttccaaattgttgtaagaagctgcttttagcacctgtgctcacccacccccacaccctgaaatacaggacaatactgagttcatctttgtgtccttggcccagccaggactgctctcactagaagagcataggcaggcctgggttcaaatcctgtctccaggatgccgggaaagctccgtgcctgttataaagtgagcaatgctaaataagggctgtaaatattaaattttttatttttatttttgagacggagtctcgctctgttgcccaggctggagtgcagtggtgcaatctccgctcactgcaacctctccctcccgggttcaagcgattctcctgcctcagctttctgagttgctgggattacaagcacccgccaccacagctggctaatttttgtacttttttaagtacagacggggtttcaccatgttggccaggctggtcttgaactcctgacctttcaggtgatccacccgcctcggcctccaaagtgctgtgattacaggcatgagcctctgtgcccagccacatttttaatttttattttggcttgtcactgactcgaagctcaaatcactcttgattacgataaatgaatgcccagctaagcagatgggtgggcaggtggatggatatggtggatggatggaaagatgaatggatggacagttagagtagtgagtgagtagatgggtgggtggacagagtagtgagtgagtagatggatgggtgaacagttagagtagtgagtgagtagatggatgggtggacagttagagtagtgagtgagtagatggatgggtgacagagtagtgagtgagtagatggatgggtgaacagttagagtagtgagtgagaagatggatgggtgaacagttagagtagtgagtgagtggatggatgggtggacagttagagtagtgagtgagtagatggatgggtggacagagtagtgagtgagaagatggatgtgtggacagttagagtagtgagtgagaagatggatgggtgaacagagtagtgagtgagtagatggatgggtgaacagttacagtagtgagtgagaagatggatgggtgaacagttagagtagtgagtgagtggatggatgggtggacagttagagtagtgagtgagtagatggatgggtggacagagtagtgagtgagaagatggatgtgtggacagagtagtgagtgagaagatggatgggtgaacagttagagtagtgagtgagtagatggatgggtggacagttagagtagtgagtgagtagatggatgggtggacagttagagtagtgagtgagtagatggatgggtggacagttagagtagtgagtgagtagatggatggctggacagttagagtagtgagtgagtagatggatgggtggacagttagagtagtgagtgagtagatggatggctggacagtgacatgcagaggcaggggggtagaaagatggataggtggctgggtgaggatcgtcacgcctgtaatcccaggacttagggaggccgaggtgggcggatcacgaggtcaggagatcaagaccatcctggctaacacggtgaaacccgtctctactgaaaatacaaaaaattagctgggcgtggtagcgggcgcctgtagtcccagctactcgggaggctgaggcaggagaatggcgtgaacctgggaggcggagcttgcagtgagccgagatagcgccactgcactccagcctgggcgacagagtgagactctgtcttaaaaaaaaaaaaaaagaaaaagagaaagatggataggtgtaaggatggatagatgggtgggtggatgaatgaatgaatgagtgaggaagtaggtgagtaggtagatgggtgggttggtgaatgtttgtatggttgtattgacgtatggacacatggattaataagatatagggggctgggcgtggtggctcacacctgttatcccaacactttgggaggctgaggggggtggatcacctgaaagatcaggagtttgagaccagcctagccaacatggtgaaaccctatctctaccaaaaaatgcaaaaattagccaggcgtggtggcgcacacctgtagtcccagctactcgggaggctgaggtggaagaatcgcttgaacccaggagggggaggctgtagtgagccgagcttacaccactgcactccagcctgggtgacagagtgagaccctgtctcaaaagaaaaagaaaaaaactgaatctaacaacacctctagttaaagtttccaatttaacaagaaatgcagatgaaaggggaacagagacctacaagcaaatacaatggggagactgtttaattgttaaaaacaaacaaacaaacaaacaaacaaaaaaacagccaattggctgggcacagtagctcacacctgtaatctcagcactttgggaggccaacgtgttcagatcacttgaggccagaagttcaagaccagactggccaacagggcgaaaccctgtctttactaaaaatacaaaaaaattagctgggcatggtggtccacacctgtaatcacaactgctcaggaggatgaggcatgagaatcgtttgaacccaggaggcagaggttgtagtgagccaacatcacacaactgtactccagcctgggtgacaaagcaagactctgtctctaaaaacaaaaccaaaccaaaacagcccattggagaaatctgaacatagactggacatcatatgatattaaggggttacatcatatgatattaaggacatcatatgatattaatgttgttacgtgtaataatcactttggttacagtttcttcagtgcttatatgttagagatatgtactgcaatatttacaagcataaagatgcagtgtctaggatttgctctgatatattctggaaaaaaatagggaagtggctgggcacggtggctcacgcctgtaatcccagcactttgggaggccgaggcaggtggatcacctgaggtcaggagtttgagaccagcctggccaacatggcgaaaccctgtctctactaaaaatacaaaaattagccgcttgtggcggtgcgtgcctgtaatcccagctattcaggaggctgaggcagaaaactgattgaaccctggggggggggggggggcgggcggggcggagcttgcggtgacccaagatggtgccactgcactccagcctgggcgacagagcgagactctgtctcaaaaacaaacaaacaaacaaaaaagaaacagggaagtacatgtgaaattaaactggccctgggcgcggtggctcatgcctgtaatcccagcactttgggaggccgaggcgggcggatcacgaggtcaggagattgagaccatcctggtgaacaccgtgaaaccctgtctctactaaaaatacaaaaaaaatagccaggcgtggtggcggtcacttgtagtcccagctactccggagacttaggcaggagaatggcatgaacccaggaggcggagcttgccgtgagcagagattgcgccactgcactccagcctgggcgacagagcgagactccatctcaaagaaaaaaaaaaaaagaaattaaactggcagcatgttaacaattattgaagctgggtgaagatacctgagatgtcatcaaactattttcacttttttttttttttttttttgagacagagtctcgctttttgcacaggctggaatgcaatggctagatctcggctcactgcaacccctgcgccccgggttcaagcgattctcctgcctcagcctccctggtagctggaaatacaggcgcccaccaccatacccagctaattttgtattttcagtagagacagggtttcaccatgttggccaggctggtctcaaactcctgacttcaggtgttccgccggcctcagcctcccaaagtgctgggattacaggcgtgagccaccatgccccggtaatttttgtattttaggtagagacggattttgccatgttagccaggctgatcttgaactcctgacctcaggtgatccaccagactcatcctcccaaagtgctgggattacaggcgtaaaccactgggcacagcctaaacttttcataattaaaaaaacaatttggccgggcgcagtggctcacgcctgtaatcccagcactttgcgaggctgaggtgggcggatcacctgaggtcgggagtttgagacaagcctgaccaacatggagaaaccccatctctactaaaaacataaaaaaaaattagccggtcgtgagggcacatgcctgtaatcccagctacttgggatgctgaggcaggagaatcgcttgaacccaggaggcagaggttgcagtgagccgacatcgcgccattgcattccatcctgggcaacaatagtgaaaccccgactcaaaaaaaaaaaaaaaaacatttggccgggcacggtagttcacacctgtaatcccagcactttgggaggccgaggcgggcggatcacgaggtcaggagttcgagaccagcctggccaacatggttaaaccctgtctctactaaaaatacaaaagttagccaggcacggtggtgggagcctgtaataacagctactagggaggctgaggcaggagaatcgctcacaagtgctcaccaccatgcctggcttttttttttttttaacagatggactctcactatgttgcccaggctggtgttgaactcctgggctcaagtgatcctcctgccttggtaccccaaagtgcagggattataggcatgaggaaccacacctggccatgataaaagtttgaaaacaaacagacgccaggcgcggtggttcacgcctgtaatcccagcactttgggaggccgaggtaggtggatcacctgaggtcaggagttcgagaccagcctggccaacatggcaaaaccccgtctctactaagaatacaaacattagccaggtgtggaggcgcatgcctgtaatcccagctactcaggaggctcagcctcagcagagaattgcttgaacccgggaggcagaggttgtggtgatctgagatggtgccactgcactccagcctgggtgacagagcgagactgtgtctcaaaaacaaacaaaaaagaaacagagaagtatatgcgaaattaaactggcaacatgttaacaattattgatgctgggcgaagatacatgagatgtcatcaaactattttcactttttttttttttttgcaagggagtttcactctttttgcaacccccgcctcccaggttgaagcgattttcctgcctcagcctcccgagtagctggaaacacaggctcgcatcaccacgcccagctaattttgtattttcagtacagacagggttttaccatgttggccaggctggtctcaaactcctgatttcaggtgatccagtggcctcagcttcccaaagtgctgggattacaggcgtgagccaccatgactggctaatttttgtattttaagtagagacagatttcactatgttgaccaggcttgtcttgaactcctgacctcaggtgatccacccgcctcagcctcccaaagtgctgggattacaggcgtgaaccaccgggcacagctaaacttttcataattaaaaaaaaaagaaaaatttggccgggcgcggtggctcatgcctgtaatcccagcactttgggaggctgaggtgggtggatcatgaggtcaggtgttggagaccagcctggccaacatggtgagaccccacctatactaaaaattcaaaaattagccgggcatagtggtgggcacctgtaataacagctactcgggatgctgaggcagaagaatcgctcacaagtgctcaccactgttgcgggaagtcagggacccctaacagacggaccggctggagccacggcagaggaacataaattgtgaagataacatggacatttatcacttcccaaataatactcttataatttcttacgcctgtcttactttcatctcttaatcctgttatcttcataagctgaggatgtacgtcacctcaggaccctgtgataattgtgttaactgtacaaattgattgtaaaatgtgtgtttgaacaatgtgaaatcagcgcacattgaaaaagaacagaatgagagtgattttagggaacaagggaagacaaccctaaggtctgactgcctgcggggctgggcaaaaagagccatatttttcttcttgcagagagcctataagtggacgtgcaagtaggagagatattgctaaattattttcctagcaaggaatattaacattaagaccctgggaaaggaattcattcctggggggaggtctataaatggccgctctgggaatgtctgtcctatgcagttgagataaggactgagatgcaccctggtctcctgcagtaccctcaggcttactagggtggggaaaaaccccgccctggtaaatttgaggtcagaccagttctctgctcttgaaccctgttttctgttgtttaagatgtttatcaagacaatatgtgcaccactgaacatagacccttatcagttctgcttttgccctttgccttgtgatctttgttggaccctgatcagtagttccgttttttgccctttgaagcatgtgatctttgtacctattctcggttcttacacccccttcccttctgaaatccttaataaaacttgctggctttgagctcaggtgggcatcatggtcctaccgatatgtgatgtcacccccggaggcccagctgtcaaattcctctctttgtactctttctctttatttctcagctggccagcacttacggaaaatagaaagaacctacatcgaggccgggcacagtggctcacacctgtaatcccagcactttgggaggccgaggtgggaggatcatgaggtcaggagattgagaccatcctggctaaatgtgaaaccccatctctactaaaaatacaaaaaattagccgggcgcggtggcaggcgcctgtagtcccagctactggggaggctgaggcaggagaatggcatgaacccaggaggcagagcttgcagtgagctgagatcgcaccactgcactccagcctgggcgacagagcgagactccatctcaaaaaaaaaaaaaaaaagaacctacattgaaatattaggggcaggttcccccgataccaccatgcgtggctttttaaaatttttttttaacagatggcctcttactatgttgcccacgctggtgttgaactcctggactcaagtgatcctcctgccttggcacccaaagtgcagggattataggcatgagcaaccacacatggccatgataatagctggaaaacacaaaaaggccgggcgtggtgggtcacacctgtaatcccagcgctttgggaggcaaatgcccgcaaatgtgggcagatcacaaggtcaggagtttgagaccagcctgaccaacatggtgaaacctagtctctagtaaaaatacaaaaattagctgggcgtggtggtgcgtgcctgtaatcccagctactcaggaggctgaggcaggaaaatcgcttgaacctggaaggcggagcttgcagtgagccgagatcatgccaccgcactccagcctgggcgacagagcgagactctgtctcaaaaaaaaaaagagagagagagagaaaatagccaggtgcggtggctcacacctgtaatctcagcactttgggaggccaaggcaggtggatcacgaggtcaggagttcaagaccagcctggccaagatggtgaaatcccgtctctactaaaactacaaaaattagccgggcgtggtggtgggcgcctgtaatcccagttactcaggaggatgaggcaggagaattgcttgaacccaggaggcagaggttgcagtgagccaagatcatgcctctgcactccagcctgggtgacaaagcaagactctgtctcgaaaaaaaataaataaataaaaattaaaataaaaaaaaaagagagaaaacaaaaagaacaagctatggagaggtccccatctagactctgaatcaagagtccagagagacagccctgtggagtgcttgagagcactcctactccagctgcccttggggccatgtcacaaatctgggccagcatccccatcatctcctgagcaccacaccttccttggatgcctgtgaccatcactcgtatcaggtcttgtcacctcctgaccaaagcatggccatcagggactgtgtgggtgtccaagcttctgtccatgcggccctggtagtcattggtgggtgtcccttctcaaaagtgagaacacagggtgctgggtaacctatggtgtctttttgccttgacagccccacgccgacacttactcccgtggtcctgtagactggagggatcctcagaagtgggcttaccgagatctaagcagccgaggatcccaacgacaagtcccatcacgtggtacagaggcaggaccgtgtaaaccacatcatcagctgtggccccagataaggacagcatcttgctcatctgcagtacccgctcatgcgtgaggatggctggcttcgggaggccttgggatgaaggcatggcaagggcagggtggtgacatgacagcacagagaggggcctgaccagagggatagatctccaacagccaggcctacattggggtttgaggctctcagagaacagtcaagtatagggatttgtggttgggttcacaggctgaatttggactgaaagtaatatgtcaagatcaaaggtttcagtggctgtttactggacacaggaagaattctggcattgacctctcaaattacattgggggtcagagttcaggccaaatatcaaaatcaagtctgggagcagtggctcacgcctgtaatcccagcattttgagaggctgagttgggcaggtcccctgaggtcaggggttagagaccagcctggctaacttggggaaaccctgtctctaccaaaaatacaaaaattagctgggcatagtggtgtgtgcctgtaatcccagctactcaggaggctgaggcaagagaattgcttgaacccaggaggtggaggttgcagtgagccgagattgcaccactgcagtccagcctaggcgacagagcgagactctgcctcgaaaaaaaaaacagccaaacaaaaaacaaatgtcaaaatcagagggtaaagtggtttcagaggtcaacactgagtcacaagtcaagtgtggggtcaggtcagcctgagagttcagaggctggtgctagggctaatgggcaccctcaccagtggtccccgaggtatagatgaagagggcagggcttctccatgtgatcccagcacgcaggtcagcaggcactgggtgggagggcgctgcatccagggcagcccccagagcccccacccctggtgtaggggaggtatggctgaggtagaagcagcggatgttctcagcctgcagcttgggaaggatctcctccaggctctcccggaggtctgcagagatgggtcagaggagaaacagaggcaaggctcacctttgaggttgcgaggcgggatctgagacccacagatgcaggcagaggagcagctagtagagaaaagcatccatgttgtttggtaaagaatcccatcattagtatttttggtcaaattgtgggaaaattaaactctgatgacctgagaactactttctgctcataagtcttgattataattgcctgtgaaagtaggcaggtggggaccaagggcctctgccagtcccagcagaacccctgtcctatagtccctgcccttgcccccttccattctccactggctccaaggccctcacctgggtccaccaccagcacccgggccccagagctcagcacagagtgcgccaggggcatcccccggccatgcgggttgatccaggctgttgggcagcccagcttggccagccccagccacatacacagggctggaacggcctgggaagccagcacaaggagggcagtaggctccccggcacacaggctcgcagggtcacccagctcagccttcagggcccatgccgcctggcaggcccgggcatccagctcaccaaaggtgactgagccggccccaggccccgtccacaccaagagtgccctgccaggctgcgctcgtgctcgccgctcgaaggcatctacaaaggtgtcaggcggctgccggctcaagcatcccctgatcttcaggcccaggtggaggatcttggccaagaagatcacatcagccggcagccagcgtagtcctgggggcagccgtgctggcaggagggttagtgccagggccgcagctgccaggctcagcccatggggcacccaggggccgagccagggccgtgctaacatggccagcccaagtagcacgcaacatgtgggatcccccaggagccagcgcagggtcaaggccacagcgactggccacactggctgccccaggccccagagcaggagcagcagcagcagcagcaaggccaactgttgcctgacacccatggtaccagctcctccctaggagcagcagctgtggagtgttcaggctcacctctggcccctcaagagtagcccaatggctcctccccaggggtggtggccctggcactgctgacagtggctggtcctctccccaggactttgcccccagcccttctcctctacgtttgtttgctctgcctggtcttgtgtgtgggtccagcccctctctgcctggcgctaaccctttccatcactggcctctgggttcccaggtctctgccccttgggcaccactagcctccttcctgctgtcctgcttgccccatccaccctccagggctggcatctaactcccttgcctcccctcccatccctgctgggtaccagacactcagagcacagaaatccctgcccttgggaacactccaatcaggccaaacagaaaagcaacaggacagcaaggtggacctcattgggaggtcctcctgtgacacccactgaaaccctgaggagaggggctcagccaggctaagccccttgtcccatgatccgaggaatcgtaccctcctgccaggcatacagcaagtgctcagtaaatacaggaacactggcatcgcctggattcaaacccagctctgccccccacccatgtgcttgctctgactctctgctccacctctggctttgacgacgatggagtcctggggttcaggagactgaagtcagcccatgatgcacacagttggatcatgaaagccctggcctctcaccttgaggaagcagtctcagaaggtgaacccagaggagctgccattggcctaggagcctggcaggtcaggctggggtatggcctggggccataccccactccaccagctccaaatccttatggcagggcacctaggctaggagccactattgtgctgaagaggagaggggcaaagagtggctgctctctccgctggatgcaggggcctgggacactggctggccagtaggggtggtgtccccaaccgcccagcagtcagccccaggatcccacccctcactgtttcctgcccccaacacggccatcggagccctccctgaactttgcccccagcaccaagggcagatatatgggggcttatataccctcagtgcaacctggccccaaagatccccctgggctccccacaagtaaggtgctcagccatgtccatcaaggtcggggaggggaagtcttaagtccaaaagacccttagagcctgactggaagatctatgggaggggccttaaaggtcgtggacagcagcaaccaggagtatgatggggctttcacgtggcctccctctcggagacccacctcagatgtggcctgcctatcctactccccacaggactgagggatccaagagaaccaagtgctggttatatatgcagcccaccttagcccctacagaatagaggtcctagatggcaaagtggaccatcctgttcctgcccaggacagcctgtgggccgcatggatgccacccaagaacagggacgctgaaccctgacactcacatcttgtctatgagggcaaggcacgcactgatccaggtgctcacagcttcgtggtttaggccccatggcctacagtcctttattagagcgagagtcccgaggcccagcccccatatatgatgggtccacttgagtctccttaggcgccccatgagggagtaacagcttgggtagagagctagggaccttgcccagcctgaccctggggcaggcaagcggccccccagcccccaccaccaccccaggagagggcggggtgagaaccggagtcaaatcttgggccgggtccaagcgcctgagcgcccggtttacgcaggaaatagtccagttctcagaagtggtctaaccagccccagccccagcccggcaccacctggagggttcaagtacatggaggagaggagtaaggcggacttaggccctggtatggagaaagggtgaagggagagagaggacctgcgctcaggagggagcgtggtctagtggcgggaaccacgggtcccgcagcgggcgtggccgactgtgcgggaggccccggatccaccgtgggcgaggccaggccccagcgccatcagggcgcagggtgcgccgccaggtggcgctccagcagcgcgcggtgcgagaagaccttgccgcaggcggggcagggcgcgcgctcgggccggtgagtgcgcatgtgcacgttgagcgagctcttctgcgtgaagcgcttggcgcagacggcgcactggaaggcgcgcacgccggtgtgcgtgaccatgtgtttgagcaggtagtcgcgtagagagaaggatcgccagcacacggcgcactggtgcggcttctcccctgcggaagacagggcgggccgcgaacgcaagtcagactctacagctccccgcccccaccccaccccacccccacctgggctcctggacctagcaggggctcccctcccctcccgaaccaccaccccgggatcccttgcctatcagagaaccctcccctcactatgggatcttcctgcccagcagggacaccccctcctctccaggacctcccttcacgttgggactttcctgcccaacagggatcctcatacactgtgaggtacccctctcccatcccttcctggcagggaccccctttctgttatcctgggatatcactgtgacagggcacccctaaatccagcaagcaccctgtctgcaaggaacccagcctgtctggaacatctgttggccatctggactgcccactgggatctccctctaccctcaggtaccctccccctcaacccctacccacccggcacagggagacactgggtcctggcccccctcgcctatgcccatagagtcccctaaactcagtctgacaaggccagtgccctttcataaggagggacctgggcacatctgccaccttcctgcaggaagccccagttgcccagaacccctgcccgctggccactataatgtccttggtgtgatagagagagctcctcattctgggttaggggaggggaggcagtctgagtccacccctagattcatcagatgttaacaaaatgcctgtctcagccaggcgtggtggctcacacctgtaatcccagcactttgggaggccaaggcaggcagatcgcttgaggccaggagttcgagaccaacgtggtgaaaccccatctctactaaaaatacaaaaaatagccgggtgtggtggtgcacgcctgtaatcccagctacttgggagactgaggcacaagaatcacttgaacccaggaggcagaggttgcagtgagccgagatcacaccactgcactccagcctgggcaacagagggagactcggtctcaaaaaaaattaaaaaaaaaaaaaccctatctcagtggcagtggactgaaaggcagtgcctgccagagggtaccccagaataacctggcccaggcacctggctcagatcacacacttcacacagccagcactaccctggggcctctggcagttccctggagactaatcacccaactcccttattcccaggcccctggcttctcccagggcagccagaggtgattttaaactgacatctcagtcactccccagcttagaacaccatggcttccccaccactcacagtcaaatcccaagttccagcccctgcagaaaccccctcactatcactgtggccttccagccaaatttttgctttttctgacaatgctcagcaggcttctgctttccattcctttgtcctccatctcagagcccccagggagcatcctcaccacattccccagtaccaccctcccactctttacctctcctgcagcactgcagagccgcctccctgacacggccaaggtccgagggaacctccccacagcttttcggggtcctctgcagctgtggagtccccacactacctatgttttcctactcatgccccagtctcaggagttcctggggccttcatcccaccacctctgagggctttctacccctgggcctgtaaacccatcctcccttgctgccagcctataacgggacagctggaaaccagagagacacaggaggctccctggagcatagtttcccaacctgccaggacctcctgccaaggctccatacccatcatgtgcatcccaggctgctcaagtttccaccaccacccttccaaaggccaggacaggctcctgcttccctacccagcctcaggatccccctccacagaagccagtgcctgctgctccacagagtggggctttcccctcccccacataccttgcacttgggggaaggctcaatttctaggccccctgctaaccaaaagtaacagaacagtgccagtgccctgtaactagtgctcaattccccctcaggtttaactctccgatgagagattgctccctctcctcccccgccctggctcacccgagtggatgaacatgtgcttggtgtagtttttccgggagctgaacgtcttgcgacagtggctgcactcatacgtaggtggctcagcacctggggtgcgagcaggggtgcctgagggggccgtggtgggagcagcagagggagccgggacctcccccagctgagtactgggggctgcctcgggctggagtgtggggtagaaggcgggtgggggcgcaggggctggccccgatggtgctgaagggggtggtgcgggtggcccaggggcacccaagtgaaaggggaagagtgcaacgggcggccctggggtcttcacaccaggcgggcgggatccagacagtatgcagtcgggctggacaggggtctcagtgggacagccttcggggacagcgccatcctcgtcgtgccaagtggatacatagctgtctggaaatacgtcctcagctgacccagctccccgaagaaaatctctcccggcaccactgtagtcagcgaggccagtgggtgcagggggctcctcgcacgcgctgtcagcagcagcagtgaggaagccagcagcacagtctgggaaggaaggaggtgcctggccctcgcctgggccgccaccttcgccatcctcgccatcggtctcatcgtcactttcctcgtcatcctcgtcacctcggtcatcaggggccgcggacagtgaggggtcagcatcaggcccctcagccttggcaggtgttgggggcgctggcagctgcaaacgcgcgggctggcgctgcttacggctgtgtgcagcaccggggtgccccgggggacgtgcagccagcaggtggcgcaggcggtgacgcagctgcgcaggtgcgagtggcgggggcacaggggtgggcaggggcgtgggcgcagaggtgcccggggctcgagcgcgggcgataatctgcgtgcattcgtcgataactgtctgtatgcgaagcactgacgcggccgtgagcacctgcagggcttcaccctgcgccacaacgagcgaaccgctgtacaggaactctaccagctgtcgcactgtctgcgcgggcaccaccggaggcacacggatctcagagtggccgagcagcagcttgtcttggaagaagggtgagccggccgccagcacgcagcggtgggcacgcagcgaagcttcacgaatgcgcacagtcacgtcacagaagtgtcccccaagcctctgcccattgagggtctcaagcagagagcgtgagaagttctgcaggtgtatgtgatgcacagcctctgcagccgccatctgcacagaacaagaggagggcagggagaggtcaactgaggacccccatctgtcccaacgtccctgtcccctcaccccttgttgcaggacagggctcgagtgcaccacactccaaggcgcgctaacccatccctccccagctgcccttcacagtccccattcccaacacaggacactccagcactccctcctccccctacctcagacctggccaggccgtctacagccccccattaacgctgcaaaccctagcacacccctaggagagggtgttggcctcaatcactgctcccgaaaaggttcaggccttggcctactctatgttgactcacccacccaccccaccccaactccaataaccctaagcctccccatgtgcccctccaagagggcagcccggtgtgtagaagaggccagggacccccatcccaactggctaacctgcctcaccccgagtagaccttgctctctacccagctagcttccactcctcctccacccctgctgacagctccttttggtttcctttagccacatccccccagtatgagaccctgtgcataggcaggattgctgcctcagaaccaggtcaccttaactagtatatacagaggctctcgcaggagtggggtggcatgacctgcttcctgggcagggtggttctgggtgtgcctagtcactaagggctgagggtaaaaggttgggcagtaccttgggagatgccccagggaaaccagtacatgctccctggcagcccctagcatagcgagcagggaggtggctcctgcagccccagcttcttgccatctcgatggggcctgtggggcccagggtgtgggtgtggcacagagaggggaagtgtggattgagcaggggtgtgtgactggatagctgcccatggagtaatcggggacacggcccaacatcaggcaccagaaaggggagggggtagtcctcagaggactctggaatctgaggagttctgctactccatccatcaagcaggtaaaccgtgatccttcggcctgtttccccttctatcaaacaagggatgagatactcggctcatcccgcacccagactgcacacacctccagtctaagggaggagggtaggagctctggactctgacatccgtataggctccaccagcctgtctctcccttggagtcacaaagccccagggtgggctcggcttgatgctgcccctacaccctcgggctctactggggtctcaagattcaacccctccgactccttatgcccaatccgccgtccctttgctcagccagacgcctcccttttttgcatgccccacatttgaccctcagaccacttcgagcacctccactgccccgttcccgctgtcctggacggatgaagaaacctggctggtgtctctgcgcccctcgcctccccttctgttccccacacggcagccagagggagcttttccagactacggatccggatacaccaccccgctccctggccctgttctgagccttctgtgcaatgcctcaaaaaagccaggcctgtgcccgcgcaaaggctaactcagcaagcagcaccgccccatctgtattcacctagcacctgaaaggattctaatctgtccggccgatggggacggaaacttgcgcatcaacccgagagacttgaaccttcctttcccgccccgccccgcgacgggctccattcctcagtcccgacgccgcaaggccggcctggacacttcagaacaaaggcctgcactcgagacccggcgcccaggccagcttcccgggtccggcgccgcacactcccgccacgccttcgccgcgccgtgtgctttactccgagcgcgttctcccatactctgctccattgcccgcgccccaccctacgcccaaagcacccctctgacccgccgctgccaccccgcactctggcccccgccgtaccccggtcctgcagcgccccctcgcgttctcagcgtgcgcttctagcggagcgcaggtgcccctcccctggcacgccccagcctcctcgcccgccctgcggcagggggatgcccattcgaccccacctccgactcctcttcaggcaccaggctctgccgtggccgcttcctcctgaccgactacaaggccgcacttccgggccgttaccccggcggaacggaggcctgcggtcgcggcggcgcaggggaaaccctaggccgaagcacgtttccggtatttttatggcgatcagctcccgccagtctgcactccggctctcctcttagtcggaaccaaagtcgaagaggctagggctgccgcgtcgcgaggaatgtctggaccagagcactcttccggcgtcgcccaggagatcaggggtgtggcgggcctgcgcgatcaatccgcaagctccctgtgatgcagaatgggaaggcagttcccggcccaagtgcccaacgtgttctggccagtttaaaccccactgcgaaccggggaagtggccttattcctgtgacacgggtgagagctgaagtaggtctcggtccctggccgccaggaggtgcaagcaagctaccactactgcagacgctccaggcccgcccgctgtgggtgggactggggaaaggaccccatctcggccttggcaccttctactacaacgcagacaggaatagacaactgcctcaccctgctctgggcctcccctgagctagaccctgtgagattctgggacattgcaagtcaatctggtatgggggacagaattccgaaaatggccccctccgagatttccgtgcccaaatccccagaacctgtaaatatgattatctcacctatgaatagttacactacatggtgaaagggtttttgcggaaataattaaggttactcattagctgatcttaaaataggatatgattctggattattttggtaggtccaaggtatcataagggtccttaaaggcagaagaggaaggtggagaaacttgaagtaggagaagggttccagaggctttgaaggtagagaggtccatgagaggaaatgcaacaggacaggtgtcatgctgagaatctgagaagagctgcaacaacagccagcaagaaaacagacctcatggcccggcgcagtggctcatgcctgtaatcccagcactttgggaggccaaggcgggtggatcacgtcaggagatcgagaccatcctgactaacacagtgaaaccccatctctactaaaaatacagaaaattagctgggcgtggtggcaggcgcctgtagtcccagctactcgggagactgaggcaggagactggcatgaacccgggaggcggagcttgaagtgagctgagatcgcgccactgcactccagcctgggcgacagaacgagactccgtctcaaaaaaaaaaaaaaaaaaaaaaaaaaaaaaaggccgggcgcggtggctcacgcctgtaatcccagcactgtgggaggccgaggcgggcggatcatgaggtcaggagatcgagaccatcctggctaacacggtgaaaccccgtctctactaaaaatacaaaaaaaaattagccgagcgcggtggcaggcgcctgtagtcccagctactcaggaggctgaggcaggagaatggcgtgaacccgggaggcggagcttgcagtgagccaagatagcgccactgcagtcgggcctgggcgaaagagcgacactcagtctcaaaaaaaaaaaaaaaaaagaaagaaagaaaagaaaacagaccttagccctagaagtgcgtggagctagattccgcccacaacctgaatgagcttggaagcaaattcttccccagagcctccagatagcagcttagtccataccacaccttgattttagcctttatgagacccacagaagacctacttgggcttctgacctatggaatggtgagctaataaatggatattgttttaacctatggagttttggtaatttgttatagtaacgatagaaaacaaatacatctggtgagatccagggcctccacacagtgagagtccaataaatgccactatttgtttcccatctgatgaacgcattcctcacatttccctcactgaaagctttatttctgtgccttcccagcttttaccaggccccttcgtgatctcattcctcagggagcagttctcacttcccctatcccagaggacagagggactcggcagtgaaagagggaaccaactgtccaaacgcatgactagaacaaagcctccagaagacagacagggtcaggatgcctgtccttcacccaggacagctactgggtgattgtgttgtagatgtggtatttggaggtcagggggaggaaaatatgtaccaggtgggaaacctcattaaaacacaagtctaggctgggcacagtggctcacacctgtaatcccagcactttgggaggccgaggcgggtggatcacctgatgtcaggagtttgagaccagcctggacaacatggtgaaaccccgtctctactttttttttttttttttctgagacaaagtctcgctcttgtcccccaggctggagcgcaatggcgcgatcttggctcactgcaacctccgcctcacaggttcaagcgattctcctgcctcagcctcctgagtagctgagattacaggcacctaccaccatgccccactaatttttgtatttttagtagagacggtgtttcaccatgttcaccaggctggtctcaaactcctgacctcaggtgatctgcctgcctcggcctcctaaagtgctgggattacaggcatgagccactgtgcccggcctgtccctactaaaaatacaaaacattagctgggcgtggtggcgggtgcccataatcccagctacttgggaggcggaggcaggagaatcgcttgaacccgggaggcagaggttatagtgagctgagatcgtaccattgcactccagcctgggcaacaagagtgaaaatccgtctcagaacaaaaaaacaacaaaaaacacacaagtctaataacctgccatcatcgtctttgttcagactcaaaccatggcctgctggacccactgggtctgctttcactgggctgagttttgggaagagcataagggtaggtgggaaaggcatgcatgaggcctctgaggagggaggacggccctcccttgggcaagacaaatgagtgaaccttgggctgagtggcaggattgcagtgtgttgagggggggaagccatgtcccattagccccattagcatgtttaaggggctgtagggaagacagtgcacctagtggggtggcaaacgcaggagtcctagcaggaaacaatagctgccctgacagcagtgaagggtagaaagggacagattcagggtaggaaggagaggacacgggtggctttagagaaagtctcagctccaagggatggggcctggaggattagggcaagataggggtggaagaccctgcccaagggctaggatgaacacaggaaggagaaaaaccaaaccctgacctctctcaagcagccaagggaggtgagagctgcagcctcaagggttattttccttttctctctaaagatcttttcacaaggctgggcgtggtggcgtctgtggtggcgtctgtaatctcataatttcagcaccttgggaggcttaggcaggtggatcacctgaggtcaggagttcgagaccaccctggccaacatggtgaaacccggtctctactaaaaatacaaaaattggccgagcacggtggctcatgcctgtaatcccagcactttgagaggctgagacaggtggatcacctgaggtcaggagttcgagaccagcctggccaatatggtgaaaaccccatctctagctgggcatggtggcgggcacctgtaatcccaacttctctggaggctgaggcaggagaatagcttgaacctgggaggcagaggttgcagtgagccagagatcagctgtcattgcactccagcctgggagacaagagcaagactccatcttttttgtttgtttgtttgttttgagatggagtctcactctgtcgcccaggctggagtgcagtggcgcaatcctggctcactgcaagctccgcctcctgggttcacgtcattctcctgcctcagcctcccgagtagctgggactacaggcgcccgccaccaggccccgctaatttttttgtattttcagtagagacggggtttcaccgtgttagccaggatatggactccatctttaaaaatatatatatatagaaaaattagctgggcgtggtagcaggggcctgtagtcccagctacttgggaggctgaagcagaagaatcccttgaacccaggaggtggaggttgcagtgagccaagatcacgccactgcactccagcctgggagactctgtctcaaaaaaaaaaaaaaaaaaaagggcttgggacggtggcttatgcctgtcatctcaggactttgggaggctgaggtgggcagatcacctgagatcaggagttccagcctagccaacatggcaaaaccccgtctccactaaaagtacaaaaattagccaggcgtggtggtggtgggcccctataatcccagctactcgggaggctgaggcaggagaataccttgaacccgggaggcggttgttgcagtgagccgagatcgcgccactgcacttcagcctgggcgacaagagcaagactccgtctcaaaataataataataataataaaaagaatgtgtatatatatgtgtgtgtgtgtgtgtgtgtgttcatatatgtgtgtgtgtgtgtgtgtgtgtgtgtgtgtgtgtgtgtatgaacccaaagaccttaaccctggttgtgggggcatttcaaggaataaatgtgtacctgagaacacaggtttgacaagctagggaggagggcgatgtggcctgcaaatattaaaaactccaggctaggccgggtgcagtggctcacacctgtaatcccagcactttgggaggccgaggcgggcggatcacgaggtcaggagatcgagaccatcctggctaacacggtgaaaccccatctctactaaaaatacaaaaaattagctgggcgtggtggcaggcgcctgtagtcccagctactcaggaggctgaggcaggagaatggcgtgaacctgggaggtggagcttgcagtgagccgagattgcgccactgcactccagcctgggcgacagagtgagactccgtctcaaaaaaaaaaaacaaaaaaacaattccaggctaagcccaaggcctgagatgggaaatggtggccattgagggaagagtctgtgagagcacagtgaccacagatgtgaaaggagcagaagaaattgagctccagggtgactgggcctcctcagctggctaaggcagggcccctctgacagcatgggtcagagaacagacagctcccaccaaggagtcttccagaacctctcggctgtgcctgattccatctcagtcaggatcccaacctccctccaccctccatcacttcccggccagcctttcatccaggctccccctctttggcagtcatactcaagtccttgtgtccacaaacccggccccatcctagtgggtttgggttgtgccaggtgtggaatacaggtcccatgatccatgcacaatggttgtgggggcatttcaagtactaaatgagtacacacaggagcaggcactaagcatatacctgcagaaatgcttcctggtttaaggcagatagcagcggaggctgaggggtggtccctggcaaggcaaatagcagcagtgaagacttgagcccttctgatgggacagagaagacatgggagccgtgtgaggtgtgaaggggcaatggcaggatcccctgtatactccagaaagtcctctgaggctgcagcttagagagaggctggagggaggcccagccccaggccctggtggagccagggaggtggtagaagcaatggctgggaccaggcaagttgccgttgggatttaccagaaaagtaacagcatccatacaggtattgagggctgttaacaaaggcaggtgggggcaaggaaaatttacaaccgagaaaagatttaatgtgctttcatatgtaaaatacaaagaagaaggtactaccagccctgtggacagaggcctgagaactccggaagaaggagacctaaattgagacaatactgaaaacaacacaactgccacaggcgctttgccagagtcccagcaccttgacctgtactgtgcccttggattaattctgaagagtttaaaaaacccaaaggctgggcgcggtggctcacgcctgtaatcccagcactttgggaggccgaggcaggcagatcacctgaggtcaagagttccagaccagcctgaccaacttaatgaaaccccctctctactaaaaatacagaaattagctgggcatggtggcacatgcctataatcccagctatttggcagatcacctgaggtcaagagttccagaccagcctgacctcccaaagtgctggggttataagcatgagccatggtgcctggactttattattattattattattgagatgcagtttggctcttgttgtccaggctggagtgcaatggcacaatcacagctcactgcaacctccacctcccgggttcaagtgattctcctgcttcagcctcctgagtagctgggattacaggcgcctgccaccatgtccagttaatttttgtatttttagtggagacggggtttcaccatgttggccaggctaatcccaaactcctgacctcaggtgatccacctgcctcagcctcccaaaatgctgggattacaggcgtgagccaccacgcctggctgttattattattattattttttttttttttttttttttttgagatggagtctcgctctgtcgcccaggctggagtgcagtggcgggatctcggctcactgcaagctccgcctcccgggttcacgccattctcctgcctcagcctcccaagtagctgggactacaggcgcccgccactacgcccggctaattttttgtatttttagtagagacggggtttcaccgttttagccgggatggtctcgatctcctgacctcgtgatccgcccgcctcggcctcccaaagtgctgggattacaggcgtgagccaccgcgcccggcctattattatttttttgagacagggtttcactctgtcgcccagcctggagtgcagcagcatgatcacggctcactgcagcctcatcctcccaggctcaagggatccttccacctcagtctcccgagaagctgggactacagttgtggcccaccacacctggccacaaaatgtgttttgagtaaagctctaaggtgaaggggaaagccccaaccccctattgtgggacacctggctggttccatcccgaaaagacacagtgaagctctagctgcatcccagaagataatacatccactgaagccaggttaaaatcattctccctttaatcaattttcctctattgcacccactgctcctcgatgccctggagcgaggaattccaccacccacagtaggtgtaagcttggcagctccagttttatggccccaggggacagtctttcacacctccagacacgaactctgccatataatttcccatgtgcacaattcagtgatttttagtcagtttattgtgttgtgtaaccttcaccactgtcctgttttagaacatctccatcacctccatgagattgctcagcccatttcctgagcgtccccacccctgtccccatgaatctgtccatggatgtgtctgcttgacatttcctatcagtggaatcacacaacatgaagtcttggtccctgccctctccagtcctgtcactttgtctcaggctcctgtgccacccgggtgttgtgaattgtctctggtcagatggttcagtgttttccactcaggagtggctagtctgagaagtgcttccctactaaggtgggcaactgaggcagaacagccacccagccttgttctcccagccgtcttcctgctggacccatggtggccaaggcctcagtccaggaggaatcaacctagacttgccacaccctgactttgtcccctccctctttacaagggctgctctccaccctgcctgctttgtgtttaagatattgggccatggctcacccctgtaatcccagcattttgggaggccgaggtaggtggatcacctgaggtcaggagtttgagaccaggctggccaacattggcaaaaccctgtctctactaaaatacaaaaattatctgggcgtggcagtacgtgcctgtaatctcagctactcggaggctgagacaggagaatcccttgtgaaagattctccctggggcctgaaagcttcgggggataaataactcctcccttctcaggcccagtcccaagatgcaaggccatttgtgccagcaacgtgcatcagcaagatagcagaagcaggaagagagctggccggaagacacatacccctgaagatggagggagagaggccctgggtaccacatagcagtaacatcagactaggacacttcctgtttacaggagactataaaactcctgccctgtccttacttgggacacccaggcgctcattaaaatagcatgttgctccacaccgcctcgtgttgtttgttggtgcgctctcggggttcaaaccgatactagagccttgcagcttgaacccaggaggcagaggttgcagtgagctgagatcgcgccactgcactccagcctggacgacagagcaagactagttctcaaaaaaaaaaaaaaagtccaggtgcggtggctcacgcctataatcccagcactttgggaggctgaggtgggcggatcacctgagatcaggagttcaagaccagcctgaccaacagggagaaaccccatctctactaaaaatacaaaattaggctgggcgcagtggctcacgcctgtaatcccagcactttgggaggccgaggtgggcggatcacgaggtcaggagatcgagaccatcctggctaatatggtgaaacactgtctctactaaaattacaaaaaattagccaggtgtggtggcatgcgcctgtagtgccagctactcaggaggctgaggcaggagaatcacctgaactcgagaggcggaggttgcagtgagctgagatcgcgccactgcactccagcctggatgacagagcgagactctgtctcaaaaaataataataataattaaaacattttaaaaagaaaaattagccaggtgtggtggcgcatgcctgtaatgccagctacttgggaggctgaggcaggagaattgcttgaacccgggaggcagaggttgcagtgagctgagatcacgccattgcactccagcctgggcaatgagagcaaaactccatctcaaaaaaaaaaaaaaaaagacattgatgagctcatcttttaacctcataaagcatcttttgaaaacaaggatggggtcggatgtggtggctcacatctgtaagcccagcactttgggaggccaaggcagggggatcgcttgatcccaggaatatgagagcagcctgagcaacatggcaaaccctgtatcaaaaaaatacaaaaaaagtttagccaggcatgatggcgtgtacccgtagtcccagctatgctggaggctgagatggcagcccgaggaggttgaggctgcagtgaagcaggatcgtaccaccgcactcagagcaagaccctatctcaataaatacacagataaccgttttaaagtgaacaacacagtgccttctagtatagtcacaatggtgtacaaccacctcctccatctaggtctaaaacaatttcctcactacaaaataaaaacttttctcccctctcctcagtccctggaaaccattaacctaaccttctgtctaaacaaatgtgctgattctggatttttttaaattatactttaagttctgtgatacatgtgcagaacgtgcagttttgtcacataggtatacacatgccatggtggtttgctgcacccatcaacccgtcatctacattaggtatttgtcctaatgctatccctcccctagacccccaccccagattctgcatattttacataaatggaaccatacaatatgtgagttttgtatctgacttctttcacttagcataaggttttcaaggttcaaccgtgttgtagcacatattagtacttcctttttatggctgaatgagaccccattatggctgggtgtggtggctcatgatgcctgtaagaccagcactttgggaagccaaggcaggtggatcacttgagcacaggagtttgagaccagcctgggcaacgttacaaaaccctgtctctacaaaaaatacaaaaattagccaagcatgatggtgcatgcctgcagtcccagctacttgggtaggctgaggcaggaggatcacttgagcctgggaggtcgaggctgcagtgagccatgatggcaccactacactccagtctgatgacagagaccttgccatgagagcgcatgcacacacacacacacacacacacacacctcagttgtatggatacaccacatttatttatccattaattaattacctaatggacatttgggttgtttctacttttagtgtttttttttgagacggaattttgctcgttgctcaggctggagtgcaatggcatgatctcggctcaccacaacctccgcctccagagttcaagcgattctcctgcctcgcctcccaagtagctgggattacaggcacgtgccaacacgcctggctaactttgtatttttagtagagatggggtttctccatgttggccaggctggtctcaaactcccgacctcaggtgatctgcccgcctcggcctcccaaagtgtggggactacaggcgtgagccaccgtgcctggccctacttttagttattatgaatagtgctgctgtgaacgttcttgcacaaggatttgtttgaacatctgttttctttcttttttttttttctttttttgagacagagtctcgctctgtcgcgcaggctggagtgcagtggcgcgatcttggatcactgcaagctccgcctcccgggttcacgccattctcctgcctcagcctcccaagtagctgggactacaggcgcccgccaccacgcctggctaattttttgtatttttagtagagatgggatttcactgtgttagccaggatggtctcgatctcccgacctcatgatccacctgccttggcttcccaaaatgctaggattacaggagtgagccaccgctcctggcctgaacacctgttttcaattcatgtgggtatataccttggaggtgaattgctggatcgtgtttaactgtttgaggaactgccaggctgtttcccatggtggctacaccattttgcattcccacagcaaagtatgaaggttctaatttctccacatcctcactctcacttgtcattttcagttatttttatagccatcctagtgggcgtgaagcagtatttcattgcggtttgatttgcatttccctgatgaacactgatgtggagcatttattggccatttgtatatgttctttgaacctcgtctccttctcctttttaaatagttgtattgatgtctaatctataagccataaaatacatacagcatttatagggtgggatcgtgtcatcaaccctaacgtggggcactgacagcctgactgtcccctgtacacttacgggttccccctacacagccatgttgacaccacaccctccatgtacctcataacataagcagataatcctgggcagtgcagggatttcattatgggttggcaaattaggctttttcaaattctagcatctaattatcagtgggcattctttggtaagcaagcaagaactggggccatgtgttcccctgaaatacggttccccttgggaaggcaggattgatgccaagttctcagagtgaggggctggcttaaaatcagcatcatatggtgacagatgggtttatttttctggatctctttttttgagaacacttaaggactcatgggtagtgtggatttattgtgcatcagccgatgacggtcactgttctttctgatgctccagctgtttgatcaggtttggcatctatgtccttttaacatatttccaccattctttgggcacctcttactttgtaatacaacaaggtgtttcaggctcagctaggactttccctgtatagtctgtccctgtacagtccttgaatcagccattttccccaggagccctggttcctattagcagggaaagggatgagactctgggctctgagtgtctcctgtcctcccccctccttcctttccctggaagctacaggatgctttgggaaggcagcaaacagaaggggcgagggcacccaccaagtccaggagtgggttgaatttgtacaggtcacaatgtggagctctgaacagtcccttctactctctgggaatgttttcccatctgtgaaattgggactgaagtaactgaaaatggcccccaatgatatatacatcctaactctgaaacctggaagtgttaccttattaggaaaaggggtatttgtaattgtgatttaggttcttgaaatggggagattacctggaattatttggtgcgccctacatgcaaattaacatgaatcgtaagagagaggcagaggagaaaataacgtaaggctacatggcacaaacaacagaagattttttctcacagttttggaagggaaagtttaaaatcaaggtgcaggcaaagtaggtttcattctgaggactctcctcttgctgtgttgggggaagctggggtggagctcttccacatatttgtcttttctttttttttgagatggagtttcgcgcttatcgccaaggctggagtgcagtgtcacaatctcagctcactgcaacctctgcctgccgggttcaagcaattctcctgcctcagcctcccgagtagttgggattacaggtgtgtgccaccatgcccagctcattgtttgtgtttttactagagacaaggtttcactatgttgggcagtctggtctcagactcctgactcaggtgatccgcccacctcggcctcccaaagtgttgggattacaggcgtgagccaccaccccggccatgtttttgagaaaaagtctcgctctgtcacccaggctggagtgcagtggcgtgaactggactcattgcaacctctgcctcccgggttcaagtgattctcctgccccagcctcccggtagctgggattacaggcatgtgccaccatgcctggctaattttgtatttttttagtagagatggggtttctccatgttgattaggctggtctcaaactcccgacctcaggtgatccacccgccttggcctcccaaagtgctgggattacaggcgtgagccaccacgtccggcctaatttttatatttttagtagagacagggtttcaccatgttggccaggctggtcttgaactcctgatctcaggcaagcctcccgccttagcctcccaaaggcattttttcttatggggcattagtcccattatggggccccactatcaggacatcatctaaccctaattatttcccataggccccatttccaaatatcatcacaatgaagattagggcttcaacatacgaattttagaggacacaattcagtccacagcaacgatgcatagaagacaaggcaatatgaagtgagaacagaggtatttgaagctgtcagccttcaagactggagtgatgcagtgacaagccgaggccaccagaaactggaagaagcaaggaaggatcctctcctggccttcagaactttgacagaataaagttttttttttttaagctgccatgtttgtggtaatatgctacaaaatccacaggaaactaacaggaatcatagtgattccaaagagcagttgagaagatctagttgaacactcatcttttgttctccattctgctcccacccattccccaactggaacctttgaaatgggaatcagatcatgccaccttctgctaaaatcttctgttagctcctcattacagttaaagaaacacccagccaaaagccacatacggtattgcccactgtagcagctgtgttaataacagcctgagcaggagggagaatgcagtcaagagaacatgtaagcaaactgaaggacattcatacaattgaccctacacaacaagggccggggaggaactaaggtcatatatggccatacaaatgtgcactgagaagccagacagagaagtaaagccccatgtgttttatgggtaggcaaagcttgtctgtgaagttagggcgtcagctacaagggacatgggcttctgagagccagagatgttctgttctttgctatcacagctggttagctgaggtgctccctgcttgcatctctacatatcataagcctccaccaaaaagttaaaaagtccatagagacagaaagtagattagtgattgtcaggggctggttggagggggactgtggagtgagtgttaatggttacagggattccttttggagtaatgaaaatgacttggaaatagatagaggtggtggctgcacaacattgtgaatgcatgaaatgccactgaatgtacacttttaaactggctaaaatgataaatttgatattatgtgaatattattattattattattattattttttgagacagaatctctatctccaggctggagtgcagtggcatgatctcagctcactgcaacctctgattccttggttcaagcaattctcctgcctcagcctcccaagtagctgggaatataggcacgtgccaccacgcccagctaattttttttttttttttttgaggcggagtctcactctgttgctcaggctggagtgcagtggcgcaatctcggctcactgcaagctccacctcccaggttcacgccattctcctgcctcagcctcccgagtacctgggactacaggtgcccgccaccacgcctggctaattttttgtatttttagtagagacagggtttcaccatgttagccaggatggtctcaatctcctgaccttgtgatccgcccacctcggcctgccaaagtgttgggattacaggcgtgagccaccgtgcccgacctaattcttttttttttcaagttggagtctcgctctgtcgcccaggctggagtgcaatggcatgatttttggctcactacaacctccgcctcctgggttcaagcaattctcatgcctcagcctcccaagaagctggaattacaggcacccgctaccacacccagctaatttttgtatttttagtagagaaggggtttcatcatattggtcaggctggtctcttggccaggctggtctcgaactcctgacctcatgatccgcccgccttggcctcccaaagtgttgggattacaggtgtgagccaccgtgcccagccttaatttttgtatttttagtacagacagggtttcaccatgttggccaggatggtcttgatgtcctgatcccgtgatccgcctgcttcagcctcccaaagtgctgtgattacaggcatgagccactgcacccggcctgtttgatttttttgaattaaaaaatgtactttaataatagacacggggccaggcacagtggctcacactggtaatcccagcactttgggaggctgaggcaggtggatcacctgagatcaggagtttgagaccagcctggccaacatggtgaaacctcgtctctactaaaaatacaaaaattatctgggcatggtggttagtgcctgtaatcccagctactcaggaggatcaggcaggagaatcactttaacctaggaggcagaggttgcagtgagcagagatcgcacctgggctcaagctatcctcctgccttggcctctcaaagtgctaggattataggcaagagccaccaggcctggccatacattgtaactcaattaccaaaaacaaacaaacaaaatttttaaagtaatagataccaaatctcatgttatggtctacaaaactggctcaagatggtcatcatcttcatccatttgcttgtcctttcacatatttgctgatgactgatccaccaagaagtgggctctgggctaagcacagtggatgcagtagtgagtacaatttggagctcatgtccttgtgattttctctagctgaaatggggaagaagagagccaagaagagagcccagagaataacattctgagtagaggcaatagcaagtacaaaggccctgagttgaggacaacaggtctcctatgtggctggaagagtgataaggtcagaagtcagaggtcagcagggccataccctagagttgtcaccagaattggatttttttttttgagatggagttttgcttttgttgcccaggctggagtgcagtgcctggccaacatggtaaaaccccctctctactaagaatacaaaaattggctgggtatgacggtgcacgcctgtaatcccagcactttgggaggccgagatgggtggatcatgaggtcaggagattgagaccatcctggctaacacggtgaaaccccgtctccactaaaaatacaaaaaaattagccgggcatggtggtgggcacctgtagtcctagctactcaggaggctgaggcaggagaatggcgtgaacccgggaggcggagtttgcagtgagccaagatcgcgccactgcactccagcctgggcgacagagggagacgccgtctcaaaaaaaaaaaaaaaaagaatacaaaaattatccgggcgtggtagtgggcacctgtaattccagctactcaggaggctaaggcaggagaatcgcttgaactcaggaggcagaggttgtagtgagccaagattgcgccactgcactccagcctgggtgacagaacgagactccatctcaaaaaaaagaaaaaagaagaaaaaagaaatttgagtgatgtagccacaatgcctcctcagaaagtggctttgggggtgacacctgagggtgggaaggagagcatgcacacgtgtggggtttggggaagagagggtgaggatggctatcttcaggtaggcgcacaaccaggcagtaggcagtcctcaggtggcctgggtgcagtctgagtgaccactgcatattgctacacctgtcttatgccctgtctgcaaagccaaaatattgacagttcacagtggtccaggactgggaagggagagacgtggtaaagtgttggcaaggagcatggaggacagaagtataagggatactgactgctctgccgggccacctggggagcggagccaaccaaggtgcactagcgtcctgccatatacttatggacctctgagtgaggtccctagtcttactctcctatatacccaccctggcttggccaatcctaggaagccccactctgctgtccctgagtcagcttgagcctgttttctagttaatctcccttccccgactggtgtcctggcacttgctgaagcctcaggttctccatgtggacaatggggccccacagtggtgtggaacctggtggggaggtgatgctccaaggtctgctgctggcattgggtaacacctgctgcttgtgtggctgcctcatactggggatgaaggtcttgggcccaggagaaggaaaaggggtgctcttacaatacctctctattgtgcagagagaagagcatggaccttgatgggccactgaaaccccaaggtgtgttgccagggcctggggagggcctgttatgaggggcagccgatgatagggtggcaggggatctaacataccccagaccctgctagctgtagagtaacctctctgagcacctcccaccactcctcactattgcctccctattgcctcagggaccttggacttgtttctgctcaactgccttcctgcaagtgtttggggcagcccctaggagagccatttccacactttgtaccatagtattaatattttgaccttctggccctggtacccttgtctaccctagaggccagaggcaggtgtgggtcctgtgtgacccacacgtccccctctcccgtgattttggggaccagtgcaggatagggctgtggaaagtgctcatcaaatattccttttttttttttttgagacagagtttcactcttgttgcccaggctggagtgcaatggccggatctcagctcactgcaacttctgcctcccaggttcaagcgattctcctgtcccagcctccggagtagctgggattacaggcccgtgccaccacgcccggctaatttttgtatttttagccgagacggggtttcatcatattggtcaggctggtggcgaactcccgacctcaggtgatccgcccacctcggcctcccaaagtgctgggattacagacgtgagccaccgttcctggccacagcaaatattcctaaaggacgcccacacctcgccctgtgcactgccagcaccaactttttttttttcttttcttttcttttcttttttttttaaagacagggcctcgctctgcagtcccaggtaggagagcaggggagcgatcatagctcactgcagccaactcctgggctcaagcgatctcaacgcgtcagcctctggcattaactttccctattatcagaggaaggaagccaggggccagggcgtcttcagggtggtgggctggagggggcgggccggctagcgaggcgtggccctatgaaggggcaggctgggcgtggaggcggtgactatgccgcggatggggtgggcccagatctggggggccgcgcgcccgggctggaacaaaggcagaggcggggacaaagccccgcggcccccagtccccatcaggaacaaaggccacacccggcccagcggtcgacgcgcccgtgctgcagccacgtgcggacacctgggagcggggcccggggaggcagtgccccgttaccctcacgccccgcccggctagccacctttacctgtgcgcgccttgggagtggcgaatgggtttcatggttgttcgcgccagtcctcgcggcctccaaacatcctccggaagctgccacctaccccgcccccagccgttgtcacctggaccggagacctcacgaccccaggggcaccgcacagggggctgaggcccacccccccggggccagcctcaatgcacccacccaccacgttttcaacgcgctgatagtccctaggcgggttcgcctctacctacagaccctgcttctccccttagacatgattcctctcccccagatcctgcgtccctcagacagagttcttctctcacacaccctgcttccctcctcagacgggattctccccccacacaccctgcttccctcctcagacaggattctccccacacacaccctgcttccctcctcagacaggattcttctcacacacaccctgcttccctcctcagacaggattctccccacacacaccctgcttccctcctcagacaggattctccccacacagaacctgcttccctcctcagacaggattctccccacacacaccctgcttccctcctcagacaggattctccccacacagaacctgcttccctcctcagacaggattctccccacacacaccctgcttccctcctcagacatgattcttctcacacacaccctgcttccctcagacaggattctccccacacacactctgcttccctcctcagacaggattctccccacacagaacctgcttccctcctcagacaggattctccccacaaacaccctgcttccctcctcagacaggattctccccacagagaccctgcttccctcctcagacaggatgctccccacacacaccctgcttccctcctcagacaggattcttctcacacacaccctgcttccctcctcagacaggattctccccacacacaccctgcttccctcctcagacaggattctccccacacacaccccacttccctcagacaggattctccccacacagaccctgcttccctcctcagacaggattttccccacacagaccctgcttccctcctcagacaggattctccccacacagaccctgcttccctcctcagacagggctcccctccccacacaccctgcttccctcctcagacagagttcccctccccacacagaccctctttccctcagacaggattttccccacacaaaccctactttcctcctcagacaggattctccccacacagactctgcttccctgagacaggattctccccacacacaccctgcttccctcctcagacaggattctccccacacacaccctgcttccctcctcagacaggattctcaccccacacaccctgcttccctcctcagacaggattctccccacacacaccctgcttccttcctcagacaggattctccccccacacaccctgcttccctcctcagacaggattctccccccacacaccctgcttccctcctcagacaggattcttctcacacacaccctgcttccctcctcatacaggattctccccacacacaccctgcttccctcctcagacaggattctccccacacagaccctgcttccctcctcagacaggattctccccccacaccctgcttccctcctcagacaggattctccccccacacaccctgcttccctcctcagacaggattctccccacacacaccctgcttccctcctcagacagggctccccccacacaccctgcttccctcctcagacaggattctccccacacagaccctacttccctcctcagacaggatgctccccccacacaccctgcttccctcctcagacaggattctccccccacacaccctgcttcccacctcagacaggattctccccccacacaccctgcttccctcctcatacaggattctccccacacacaccctgcttccctcctcagacaggattctccccccacacatcctgcttccctcctcagacaggattttccccacacaaaccctactttcctcctcagacaggattctctccacacagaccctgcttccctcagacaggattctccccacacagaccctgcttccctcctcaggcaggattctccccacacagaccctgcttccctcctcagacaggattctccccacacagaccctgcttccctcctcagacaggattctccccacacagaccctgcttccctcctcagacaggattctcaccccacacaccctgcttccctcctcagacaggattctccccacacacaccctgcttccctcctcagacaggattctccccccacacaccctgcttccctcctcagacaggatgctccccacacacaccctgcttccttcctcagacaggattctccccccacacaccctgcttccctcctcagacaggattctccccccacacaccctgcttccctcctcagacaggaagctccccccacacaccctgcttccctcctcatacaggattctccccacacacaccctgcttccctcctcagacaggattctccccacacagaccctgcttccctcctcagacaggattctccccccacaccctgcttccctcctcagacaggattctccccccacacaccctgcttccctcctcagacaggattctccccacacacaccctgcttccctcctcagacagggctccccccacacaccctgcttccctcctcagacaggattctccccccacacaccctgcttccctcctcagacaggattctctccacacacaccctgcttccctcctcagacaggattctccccacacacaccctgcttccctcctcagacaggattctccccacagagaccctgcttccctcctcagacaggattctcctcacacacaccctgcttccctcctcagacaggattctccccacacacaccctgcttccctcctcagacaggattctccccacacacaccctgcttccctcctcagacaggattctccccacacacaccccgcttccctcagacaggattctccccacacagaccctgcttccctcctcagacaggattttccccacacacaccctgcttccctcctcagacaggattctccccacacagaccctgcttccctcctcagacagggctcccctccccacacagaccctctttccctcagacaggattttccccacacaaaccctactttcctcctcagacaggattctccccacacagaccctgcttccctcagacaggattctccccacacagaccctgcttccctcctcaggcaggattctccccacacagaccctgcttccctcctcagacaggattctccccacacagaccctgcttccctcctcagacaggattctccccacacagaccctgcttccctcctcagacaggattctcaccccacacaccctgcttccctcctcagacaggattctccccacacacaccctgcttccctcctcagacaggattctccccacacagaccctgcttccctcctcagacagggattcccctccccacacagaccctctttccctcagacaggattttccccccacacaccctgcttccctcctcagacaggattctccccacatacaccctgcttccctcctcagacaggattctccccacacacaccctgcttccctcctcagacaggattctccccacacagaccctgcttccctcctcagacagggctcccctccccacacagaccctctttccctcagacaggattttccccacacacaccctactttcctcctcagacaggattctccccacacagaccctgcttccctcagacaggattctccccactcagaccctgcttccctcctcaggcaggattctccccacacagaacctgcttccctcctcagacaggattctccccacacacaccctgcttccctcctcagacaggattctccccacacacaccctgcttccctcctcagacaggattctccccacacagacgctgcttccctcctcagacaggattctccccacacagaccctgcttccctcctcagacagggttcccctccgcacacacaccctctttccctcagacaggattttccccacacaaaccctactttccacctcagacaggattctccccacatggacctgcttccttccctccttgggattccccactgttgaggttcagtttccccatctggaaaagcatcaaagtcagggtagctgctgacgaaaacatggggaggggatgccttggggggctgggtgggatttcacagactcattgctctttagcctcttgtgatttatatatatgtgtatatatatatatatattttttttcttgatggggggttggggggcccggcgtggtggctcacacctgtaattccagcactttgggaggccaaagtgggtctatcatctgacgtcgggagttcgagaccagcctggccaacgtggtgaaaccccgtctctattaaaaatacaaaaattagccaggcgtgatggcaggcccctgtaatcccagctactcgggaggctgaggcagaagaatcgcttgaacccgggaggcggaggttgcagcgagccgagatcgtgccactgcactccagcctgggcaacagagcaaaactccgtctcaaaacaaacacaaaaacctttctctcctcttttgagatggagtttcactcttttctcccaggctgtagtgcaatggcacgatctcggctcactgcaacctccgcctcccgggttcaagcgattctcctgcctcagcctcccgagtagctgggattacaggcgcctgccaccacgcccggctactttttgtacttttagtagagacggggtttcaccacgttggccaggctgctctcgaactcctgacttaagatccaaccgcctcgacctcccaaagtgctggaattacaggcgtgagccgccgcgcccggccacatttttctccatctgtggtctaggctggcgtgcagtggcacaatcccgcctcactgctgcctcggcctcctgggctaaacggagcttcccgactcgcctaagaaagtggtgggattacaggtatgagccacggcgcccggctgtgatctacatttgattcagtcaagtttctgtgtttctcaagtttaactatagcgtggttaaaatccaaaagtcagcacccgagctcacacaggagcttcctccctcttgggatggagactctcctcccctctccctggacacagcccttcactcggtcttggccccgcctacttctccatcggccctgccccctatcccgaactcttagtgacgcagaggctggagacgactctacggcggcgaagagacgcgggttgaggaagagggacggattgcccatgcgcttgggcgcacagcggcccgcttctgtgtggtctggaggtggagctgagaggggaatcacactctataaaggttcgcataccccactggcggattcaattgcggcagtgacgtcacagaggccccgccccgcccccacaagagccccaccgacgtggggttggcggtggtggaaggactaggagttggcgcgtgcgtactggcggcctctcccgcaccgaccggcctgggccccgcccccgggcgtgaggcgcccaatgcgcgtgcgcggcggcgtcggcgccagttatttctgtcccgccccccggcctcggctctttctgcgagcgggcgcgcgggcgagcggttgtgcttgtgcttgtggcgcgtggtgcgggtttcggcggcggctgaggaagaagcgcgggcggcgccttcgggaggcgagcaggcagcagttggccgtgccgtagcagcgtcccgcgcgcggcgggcagcggcccaggaggcgcgtggcggcgctcggcctcgcggcggcggcggcggcagcggcccagcagttggcggcgagcgcgtctgcgcctgcgcggcgggccccgcgcccctcctccccccctgggcgcccccggcggcgtgtgaatggcggcctccgcggcggcagcctcggcagcagcggcctcggccgcctctggcagcccgggcccgggcgagggctccgctggcggcgaaaagcgctccaccgccccttcggccgcagcctcggcctctgcctcagccgcggcgtcgtcgcccgcggggggcggcgccgaggcgctggagctgctggagcactgcggcgtgtgcagagagcgcctgcgacccgagagggagccccgcctgctgccctgtttgcactcggcctgtagtgcctgcttagggcccgcggcccccgccgccgccaacagctcgggggacggcggggcggcgggcgacggcaccggtaagtacgaagtgatcggtgccacccctccccctactctctgcctttgattccgactgggtgcagagatgaggatgccacctgggcgagaggatgggggcccggacagggcacgggaaatactttctgggtcctgcatacgaacgtgggtttgtgctggccgctgagatgggacatctgactaaagttggagaaaagaaggctcggggaggggaggggctggttcgctgcgggataatggtcgggggcccacccagcaggggaatggtgggggccataacctgggtgggaacttgtaacagtctcccacatccctgcttctcgaagtggtggactgtcccgtgtgcaagcaacagtgcttctccaaagacatcgtggagaattatttcatgcgtgatagtggcagcaaggctgccaccgacgcccaggatgcgaaccaggtgcgtcctatctcagcaaccacaaggaggtttctggggagggggcatctgcgcaggaggagcttggcaccagctccaggctgttactccactttcccaaggctctgggtgggctgcctaggttgggtcaagggaccaatcttaaatctccggttgtattttctgggatgtaaacgtggatctatcaagttgtcttgccttctctgaccctgcctttgtctggcagtgctgcactagctgtgaggataatgccccagccaccagctactgtgtggagtgctcggagcctctgtgtgagacctgtgtagaggcgcaccagcgggtgaagtacaccaaggaccatactgtgcgctctactggtacatgaggctgaggggggctgttggagttgttctcccatgtgtgccctcagttgcttttatgatgttggttgcatctggtggatgggtcctagagttctctagggggtgccgcccgaagggcccgagggcagaactccagaagcagaaaaactggggttgtggtgtgtagtctctagggcctaggtgggagagggtgggaaggggaaataagggagaccttaatgtgctgcagggaggtacaaagggtttgagaaggcttatcagggagttgtcagacctggtggtgaagggctcagcatatgcaaacagggaaaggcatggtgtgaagggctttctgggtttgtggttccctggcacacatctggtataagatgctgctagggaaagtagactgtgggtccatggattataagtgatgatgatttttggaagtgttttagcttttgagttggcagagacttacccaaagtttggtttggcatttccagcttttcacagacacagctagctttggtttggaaggagcttgagagtcttttgagtctagccaagttttggggccagaatcctcccatgagtggccttttggtagccatactgtgattcttcccatcccagaggacagcattggtggaagatagcgggaaggtggtggctgtggggcctgagcagccaggagggatacgcaggggctgcagggtgtcctacattccagacgtcccaggcaaaggtcagggtgcaggaatgagtggcattggggaagtcagtttccccaatgagccctgatgctacatattttggatttggttggtatgtgggaccagtgtgtttgatcagttttctaatggggagacaggctttggaggttattaatgggttggtctttgggtgggattatgctgagcaccaagattctgctctagagggggtgtgaccaccattctgagggtcctggtttgacatttcatctctcccagtatgagaacctctacaaggtttcctctgggcccttggattgtaagagaccctggtgttctcttgtcagggaagagggaggaagttaaccatgaaaggagaagaaaaggaatccagggtggtgtgtaggcagaattctgagtatgtccacttggagaagtgttcagtaaagggaacagtgtggggaagggtcagcgggggtggggggtggggtggggtggtcctctttttctagacgctgttatccttacccttacattgttgttatctctagaagctagaagaaagggatgtgtttctcagctatgttggggcagaggattctgggagcaaggagttgggcttgcaggcctgtgttcttccctggccacaccctctacatcttcccaataaatggcccagtgtcacagaacaggccggaaatgaggccccaactcattctgcttcctgagttgggggtggtgaagggcaaggtccagccttatgattcccactccccagggccagccaagtctcgggatggtgaacgtactgtctattgcaacgtacacaagcatgaaccccttgtgctgttttgtgagagctgtgatactctcacctgccgagactgccagctcaatgcccacaaggaccaccagtgagtcccaaggcatagtggttgggtgggtgggtgccaccccttccgtagcttagtgctcaggaacacatctgtctgctctcaggtaccagttcttagaggatgcagtgaggaaccagcgcaagctcctggcctcactggtgaagcgccttggggacaaacatgcaacattgcagaagagcaccaaggaggttcgcagctcgtaagtgtgggttctggggctgtgggggtggcccagggcagcaagaccctacctagcctgacctgctgtgtcccctagaatccgccaggtgtctgacgtacagaagcgtgtgcaagtggatgtcaagatggccatcctgcagatcatgaaggagctgaataagcggggccgtgtgctggtcaatgatgcccaggtaagccttgtgccggtgagaagggtccctgagccccctctgctgattgatgatgctgtctggggtgaggagtgatcctagtattcttctgccttctctgcttacctcatacaccttctatctgcagaaggtgactgaggggcagcaggagcgcctggagcggcagcactggaccatgaccaagatccagaagcaccaggagcacattctgcgctttgcctcttgggctctggagagtgacaacaacacagcccttttgctttctaagaagttggtgtgtactggtgggctcctggctggtgggttccaggcaggtggttcccaatacctcaaatccctatttgttgttggtgtgctcattctttcctccctttcactcccaaccagatctacttccagctgcaccgggccctcaagatgattgtggatcccgtggagccacatggcgagatgaagtttcagtgggacctcaatgcctggaccaagagtgccgaggcctttggtgggtccccagctttacctcactctgttattaccccacgtgctgcacctacttacgtttctctcttctttttgcaggcaagattgtggcagagcgtcctggcactaactcaacaggccctgcacccatggcccctccaagagccccagggcccctgagcaagcagggctctggcagcagccaggtgagcaggagagaggacccaggaaggggtgggcagggaatggggtccagtagcaggagagaggacccaggcagggggggtgggcagggaatggggtccagtagggttcctgtcccactgaggcagagggttctgctttgttcacagcccatggaggtgcaggaaggctatggctttgggtcaggtgagtgggtctgcctagtgggtggggaagggccccagtgctgtttctaccccaacctgccagtcttctttctccattttctaaggagatgatccctactcaagtgcagagccccatgtgtcaggtgtgaaacggtaagtatggcacctcccctgggggtgaggtggatggagggtgggggtgtactcatgccaggttgctgcatctacaggtcccgctcaggtgagggcgaggtgagcggccttatgcgcaaggtgccacgagtgagccttgaacgcctggacctggacctcacagctgacagccagccacccgtcttcaaggtcttcccaggcagtaccactgaggactacaaccttattgttattgaacgtggcgctgccgctgcagctaccggccagccagggactgcgcctgcaggaacccctggtgccccacccctggctggcatggccattgtcaaggtaagcctgtcccaaggaactatagctgtaggatgaagcctgtagtccaggtctggaccctgttgaacacccctcatcaccaccttgcaggaggaggagacggaggctgccattggagcccctcctactgccactgagggccctgagaccaaacctgtgcttatggctcttgcggagggtcctggtgctgagggtccccgcctggcctcacctagtggcagcaccagctcagggctggaggtggtggctcctgagggtacctcagccccaggtggtggcccgggaaccctggatgacagtgccaccatttgccgtgtctgccagaagccaggcgatctggttatgtgcaaccagtgtgagttttgtttccacctggactgtcacctgccggccctgcaggatgtaccagggtgagtgtgaggctggtgggggtcaagtctgggtgttgggctgtctggacaggatcatgtgcagacccttattttcttcaccctagggaggagtggagctgctcactctgccatgtgctccctgacctgaaggaggaggatggcagcctcagcctggatggtgcagacagcactggcgtggtggccaagctctcaccagccaaccagcgggtgagggctggggttacttaggtggggttgcccagagaggctttataggtgctgcccagagctgtgacatcccttacaatgtttgtagaaatgtgagcgtgtactgctggccctattctgtcacgaaccctgccgccccctgcatcagctggctaccgactccaccttctccctggtgagtcctaggatgggaaaggggaagggggtggtggctgctgggtctcgccctcaacctgtgcatgtatatgtgtgtctttgtgtgtgtatgtgtgatctctgcctgcaggaccagcccggtggcaccctggatctgaccctgatccgtgcccgcctccaggagaagttgtcacctccctacagctccccacaggagtttgcccaggatgtgggccgcatgttcaagcaattcaacaagttaactgaggtgagccagtggaatggagaggctgtgggcagggggagatgtgaaggaaagaactaggacccattcatccactgcattcctgcttggcccaggacaaggcagacgtgcagtccatcatcggcctgcagcgcttcttcgagacgcgcatgaacgaggccttcggtgacaccaagttctctgctgtgctggtggagcccccgccgatgagcctgcctggtgctggcctgagttcccaggagctgtctggtggccctggtgatggcccctgaggctggagcccccatggccagcccagcctggctctgttctctgtcctgtcaccccatccccactcccctggtggcctgactcccactccctggtggccccatcccccagttcctcacgatatggtttttacttctgtggatttaataaaaacttcaccagttcctcaggcgttggctggttgggggactgtggtcctggggcctggtttattgactgtatctactagtcagccttatcaagcactggtggcacaagggaggggggtcttgtcccccacctatcgaagcccatgtgtatggatgcctagggagtggggaagactgcctccttgccctttctgggtatggggagggtcacccagggcaaaggatgtacacactagaggcttgttgggtaccctgtgggatactgggtaggtgtgacctacatccctgtgtaggcagggttagccccaggtgtagcacagccactctactgaatgcttcctaaattttggtgctgtagctgtttctcatcttcagaaggtcccacagtgaactgagaccttccagatgtggtttttttccctgtctccctttgctgagtccacttaacattatcattcatctctgtgttatgatttagttactctacagtcgagcctgtgtgaatcccaaggccacccccttgcctctattggttggtctggactgtccttgagtgttgtcattaaaccatcactggaccaaacagtgttggacactacagcctggcagatgaggcctggactctcaagatcctaccagggtgtttgggcagtccagtatcttgggagaggtgatggagaagggcccacagctcacctgaagctcccagctcctgaaaatcccaggtggactttgcttgttcacccctgccccaaacccccacccttagcttagtaccaagtgcctcttgccttagtgatgcccatcctcccagggaccccagtctggtcccacatcaggccaaaagtcacatgggcctggagactagtgtcaaatctcttttattacagaggggttgtggtaaaagatcctgggcatccactggttatctcggagtggcaggggcactcagtccctccgcaggttcttaagccgttcctccaggtctgcatcagcatcagctagggctgaggctgcggcctctgcttttttcccaccagcagccacactaagcgagcccccagttgaggggaggtctgcagagaaagtgggggtttgagcaggtggggtcaggcagcggaggggagtaatgcagggaaagggagggcttggagctgtggctgggccttgggtgggaaatggggtccaggatttggagcactcactcgacagctcatctgttaggctaagtcccagctcatccagaacctgggacaccacagcatcactagggaagagagagaactcagtgagggctatgcactccgtgagggccaggcaaacatctccaccctcccatccagtttccccatacctctcctcttcatcttcctcatcacccatggcatcatcaatggcatcattcatcatctcctccttcatatccatgatctctgcctgccgctcaaactccatcatgatcttctggatctggggcaacttcagctggaagtgacaggagtgtgagtgtgatccccatgggtcgtgggagtgggaagggggattgggaaaagcgcacctgtctgttcatggtgcccatggccttggtgacacccttcatggcttgtgccatcgagttgttggacttgagtgtctggatcttgagggacacagcctggatgttggcccgcatcaatacaaacttgcgcacatagcgccgggtgcgcaccaagtcttttgccatgatgcgaacagcatcctgcagagtagacaagggtatcaaggacacaggaatgagattatcctacacttcttgacaccccattagttggttgtccctccccaccagcccaatttgcaattccacttgaagtttccagagactctggctaacccaatggtcactggtccctccctccttctgacctaaccctcctctgcctcttgggccaccaactccctgggctcctttgtaaggtcctcctcacttctcttgatctgtaaatggtaaaagaaaggccccaggctcactcctgagggttccttttccctccatgttttcagtcattcttttgacttacaacagccattcctcaatttttattcccagcctagacaaagaatctgtctcttccttcacctgatacaaacccatacctcgaactatccagaatcacatacagacctatctgaggctcagcttttgatttcctctccaaacatctttcttgcccatcccaagaaatggtatcttctctgcctacctgttcaggccaaaaccctctcacccatcaaaggctgtgttccttcttcatgctctccctactggttccggctgtctcttaccagcctcttggccatagcttatagcttacccttaccttttttttttttttgagttggagtcttgctttgttgcctaggctggagtgcagtggcacaatcttggctcactgcaaactgtgcctcccggcctcaagcgattcttctgcctcagcctctcgaatagctgggataacaagtatgcaccaccatgcccggctaatttttggtagagtggggttttgccatgttggccaggctggtctcgaaatcctgacctcaggtgatccacccacctcagcctcccaaagtgctgggattacaggcttgagccatcatgccgggccagcttatccttatagttaactggtttttttttttttttttgagacagagtctcgctctgtcacccaggctggagtgcagtggcatgatcttggctcactgtaacctccgcctcctgggttcaagagattgtcctgcctcagccctgctgagtagctgggattacaggcgtgcgccaccatgcctggctagttttttttattttcagtagagacggggttactctgtgttggtcaggctggtctcgaagtcctgacctcaggtgatccaaccacctctgcctcccaaagtgctgggattacaggtctctgagctactgcgcccggccctgtaatccctaaccttccaacttagctcccactttggcccagagttctgaattgtctggtccatgcccaactcttgaagctcacctgtcatctcccatttttttgaggctcttttttaacatttgctgctctgtctgcttaacacattccctgcccagatctgtaggctcactctcatcactcaagccttggatctcataccagttccttggaggcagccttccagaccctcaaactagggaagccctgctgacctttcactccactcgttttgctgaaagcacctgtgtttggtgtctggtctctcttgttcactgctgttagagccgtgcctgattgacagcaacctgcccgaccacccacactcaccatctggccttgcttggccatcttcttaatgtctgcaatgattttcttctcctgggtctctagtttctgtcgctcgcggtccagctcccgcatggcacggttcagggccctctggttctgccgcagtagctcctctggcgtcttccggcgcccgaacaataggtccatgatggtagaagctcactggcaggcctgagacagatgtgagtgaggcccagttgtagggcatggggcccaggagggcaagaagcagaacagggtcacgggagccttgccaaatgggaaggggctaacggagactggaggcaggaatgaggagccaaaagggagcagctgagaacactgggattgtcccggggacacataaagggggacaggtagacctgaaaattatccaagtgctggcccgagcccctccttcatcgccatgccccaaaagaagttatggcttgcaagttcagcttccctctccagaactatgggtgaggccctggagtccttgatacgactgagagcgggggatgacgcgggccggtgcactggtgttttggagactgtgggcaccgaggacagagcaattgtgggggttctgatagaggaggacaggatgggcggaaacgctaagtaccaagaacaggtgaatgtggggctgtgaagctcaggacaaggcattaggatttggggaccctgaatgctgagggagacggttgggggcgctggggcatcctgtacactgaggacgggatgatggagattcggtcgcactatacaccgaggacagtcagtgggcccggcaccaaagcaaggtggtgttggagacctcgatgttgacgacagggtcccagggagaagcgaggcaccggacacccgggcgagtagaaggcctcgtacgctgccgcccgcacgcccgcccgggatccacggtccagcaggggccactcaccggagctgggacggacacccgtttccgcttccgggtcacgcttctctttctgggatccccgacttgcccaccaactaaggcccctcggtcctgtcgccgccgccgccgtttccggattaaacgacgtgacgtaacatgccccgcccgcacccggaaggttgggaaactccaggagcgcgcgtgcgcccgtgccccggaacgggccagcgtccgagcgcatgcgcaacagctcccgtttcctctgcgcgtccgagtgtttcatgttttgagtcccgcccgagtgacccaagccagtaccggggtgggcgctttccacccaacctccacttgaggacccagcttattcgtgagaccttgacttctgcctgaggcctcagatagaaggagcctcagaaggctcctcctcctcggtgggcccacccacacaagaaaggggcaaagctagagatggcttgtttcttccactttgctggcctcttggccaggaagccacaggtcactggatcctgcctacgcttctcatcctagagtaggcttcatcccaaccaaccccaggcacagtcatggtatccccaccaactttagagctgccccaggcactgggcagcctgttgtagggtgctccaatgccacctgtgaccacaccttccaccaccccagctttgcaggccctaatggacctcagctgcccctcccaccccatagaagtaagaagcagaggccatgcagtaacattcccctttaatagcctggtgggacctccagaggtggaggggtgggttgcctgggcccagctacccaggcccgttgcccacccactccacagcccagagtgggggctgaacaagcacccagcaggggggctagacaagccaattcatttcccatcgctgagtgggtcgggggaggcagcgccgaccttaatcacatggtgttaaaaaaaaaaaaataactaggggcacgtggcaggaaggggaggcaaggccaaggcaggggattcccccaccggccgccccccaaacccctacccatggcccccaataaatatttgcaggggatgccagggcttgtggccgtggcgggggtgggtatgcgccaaccctatttcaggcagcgctcaaagtaggtggagccgatgtagccaccccgcatggagcgctgcacgttctgctcaaacagccgccggttgttctgcaggacctctgcggcctccttgttcagtgggtcctcggggttgggctcctgtggccagtacaggtagggggggtcaacaggccagagggacagaaggccaatctccccagacccaaccacctattcctactcaccaagaagagatactgcaggccataaattatggagtttatcgtaaggactggcttccagtcctctctgtggacagagagcatcagggtcagggcttggtgagtgggagactgccacaggcccctctggtgttgggcaggtcagatccagggcataggagagtgagcatgtgagaggctgggagggagggtgtggagcaggacaggccaaggagaaaaccaaggtcaggccatgaggaagatgactgggaaatcaagaaaccacagacaacaaaggggtgggaagggacagagtctgatgtagtgcccacaagaccatgagggaggcctggcaggcagcgctgaggagggcattagagggccagtgtcctcacctgaggatgttgaggcagacgttgccctcgaggtcaatgttggggtgatagaccattgtctcacacttcaccttggggggatcatgcgggtaaccctggcccacctggctccaggaaaagaaaagagagatgggtaggtgcctggaagggcctcagctgctgcctcctctgtccagggagccatccctgcccgcctgggactcaccttaaaactgaacacaaacttcccactcttgtagaagccctgggaggaaaagggggagaagaaaattttagggttccatcctgtggggcccgatgggcagaacatgtctccctcctctcagtggggacacccttggtttgctcctgggaattcagccatatgcaccctcacctcatcaggacagatgaccagcttgaagttgaggaggtcgtctggatctgagaagctgatatcacacgtcttgggcaggttcagctcgtttatgtctgggtttgggtagcagagagtcgggaacagaaagagggaggggaagagagagagagagggagccagcaggacacttagggcgggtgtttgttagcagagcccccatcgtctcctcctggacccccaggcgcctctcctgggctgtgctccacacctccagccctctccctgctccccagcttggctcttgtggatacacagcataccccaaacatgcatgttcagctgtgtatgcgtgtcccaactcctggcccagggtgacccccaacttttctgtatccacagctcccaaatgcccccactcccaaacatcctctgaccgccctaaaccccaggctccccatccatgacctccactctacagtatctacctgttcacccaaactcaaagatcctgcccacccccaccaaccctcagtcctcactgtccttcctcttctctgtctctcagacccagctttccatgtgacccccacactctcaagtccccaacccccgccaccctaccccaccccctctgactctgaggttcacagcacaatagcctaaatttcccctcacccctgtctccaatccctggtactcattaaccttccctcctccacctgtcaccccaaaccccaaattgctgtgactcaggcaggcccatgagtccctggtcctccaacctacttcacccgtttgactcagagattcccagagaccccagcataataaactaaatcctcttccactcatatccccaacccctggcctctactatccctctcttctccgcctgtcaccccaaacccaagttcccgtctaacccccagactctcgagtcgtcagttcctccactccactgcctgactctgagattccgagtccctagtagcagacaccaggccttcctaatatcctaaaccaccacataccgggcccctatctctgaccccctccccgtgactgcatgatcccaaccctcaagacttgacctccgaccccccccacgctcggggcccttcacctctgaccctcagcaaccgcattaccccttcctgactcccacatcaccctgcctcaggccctgacctccgacctccggctccaaccccatcccctgaccccctacccttctggatccgcagctgcgccgccgacgccttcttgctgctgcccttggtgccgcccgccgactcctcctccttcttctgctgcttcagcgagaacagcttgatcatcctgccgccgccgccgccgctgccgccgccgcggggcccgggaccccggccacccggccccccgccgccgcccgcgtcgcctccgctcctcggacccgcagctgcggcctcctccgctgctgccgccacccgcccggcctgccgcgccgctccgctcctctccgcgcccaccgcgcggcccgcctcggctcccgtagtccggctccggcctggcccagcgcctcggactcgctcggcagcgctcggccaaattcggctgttctcgggcccgcccggccccgcccccactgcccggggccgctccttccttgccctcgccaactctggtctcaggccccgctgcagctgcggactcggggctcccccgaccgtgccgtttggccgctcagctgatccctccgcgagggggtgcggctaggggtgggaggaggacacggcagctgcggtgacggcgggcgggtactggaggatcgtcttccgcggcagcagcggctttagcgcggaggtcggcaacggcctcgggcgccccgccgcttcggatatttccgccgcctgcccgctttggctcttcccgcccggcctgcgttgtgcgcctgcgcagccgccgcaaacccgcgttgctcagcgatggagtttggggttcggcctccttcggctggactcgggcatttccgttcatggagatgacgcttcggcggccttgcaggtcacttccggcgactttcgcggggccgggcaggaagcggagttagtcgccatctttgagtggggcagacgtgggccgcttttgctcgcggtcacttcatcttaagttgtatatatgtgcagagcgcggcgcgggtggtcacctccgctgctgccgccacccgcccggcctgcctttgaccctatgggtcacagacaaggcagggtgatcgcggcaagaccctgagtgagactagatgcgttacccagagggtgcgaggtcgagtaccttccctgtcccatcgcaaacccaaagatccccgttcctggagattctgattgaggtaaactaacaaaacatgtattgtgccagagagtggtaagcactgtggagggttacagtggtgtaggggaagacctgtcggggtggacacttggggaacgcgacgtgggggcggaatcgggccgctattggcgtgggcctcaagttccagcggacacgcactgcagcctctgcgcttcccccactatctggaaaaggggatggaggcgggggtcagcttcccatccaatcacagctcagcgtgcctcggagggcgggaggaaacggaactctgccggtcagcgacttccggccgtcaccacggaaactgccagccccgtgagcgcatggtgtggcacttgcctgcggaggggcccaggcgccactcctctgattctgcagatgctcccccaggagtggcttctggccaaggccaagccccttctttgaaactgcctttcagcctgtgttacctgcacccaagtcacccactggagggttgggggagaggggctgtgtgaaggacctggacaatgggatggaaggggaagatggctagggcaaaacaggcaatggcactgggtcctggagacgctgccctgaagcctgcagtatgctgaacttatgctctcagcatctgtccactttcacctaagctgcgtttccactggtttgctgctgaatctactcctgactgaaaccttccaatgtgcatggggccagggtgggagaagccttcagctctagcgatgggaatgatcaccacagggcagggaaactggcccagggcctgcagcctttgcttctcagactggctggggttccatctgcagggtcctacaccctcatcacctgctgcttgtgaacacgagaacaggaaagtcttgaaaaatctgaatttccaggtgaaatcttctagttttaaaactaggaaatggtttcctaggtgtaaaggagttttacaaagacatcctgaggcagaatctggatcaccaggtgtcagtttgctcctgctggatcgcataatcttggttggctagggagattctggcctgtctgggtcctttcctggggtttggcttggcccatggcccaggggacagccgtgacagggtgtggaggggagcatgcaggttgcaggcatcaagtttaggcacagtaccacccacaaacctgggggttggcagatccaagtgggatccttggctcccagctgtaagaagtgctgtgaccccactgcttccctttgttcctctagtactaagggtgagatgctgaatgtccccatgagtacaactcttcagcgggtactcctactgataggtagataaaggtagaaagctttggccgctcaggaccactttagggagtagggtgctgttagggtaagggtagctgtacagctgagctggggtgggagaggtagtatcatgggaatgaatcattaacgctgacttggagcaaggaggactggtgctcaggaggctggtaacctccctgaggattgagtgttctcccagcccttggaggccctggtctcagtgtcaagggaaaatcccatgggatttcatcaccagacaaggctgggctccagacctacccacctaggcatcactgtgcagggcagagactacaaacacctctcttcacttgcagatctgttaagggcaggctggaacaggggttggaaagggagaagagactaggccagcaccacctcttccccttggcaacagcaggtccttccaggagcaacagtttttacatacctcccagaaccaggctcactgggccccttggagacacccacaccagtgccccctcaggagtctcctaggcctatggggcaccctcttgagaacagagacctccagaccagctgagcagtaccccctcaggcccacagggcttccctgccagctaagagaccccaggactggctcagcagtgccctcttctcaggggcctgagttccagctccatgggaaactcattggagcttctaagttgcaatgcttccctttgttcctctagtcctaagggtctagctgcttcctgcaggaactttcccatttctaagacagattgacttaaccttctcactctcccatcaatcacctaacacctagttagctgtgctctgtctcttgatgggactcaatcagatcaggcatggcaccatgctatgcacatatgtactcttggtggatgctcacagagaacatttcttcctctctgggtttgagaaaccgaggtccattgcccagggagagctgaagctggactgcccagggcagttctgccccacctgctgctggtccattccctctgtaaactagaagctgggtatagcggccatcccacacgcggggtaggtgatgctaggagccacctctctcagggtgaagaggggtgttgtggaggtgaaccctcacaggaaccacgtggttacagagggagcacaccagcccagcactcggggggctggagggtggggagtgaaggacgcacaggtagggaggcactgagtgggtggagacccagtttccatctactgtttattggacacctacagtagccaagccctgggcggacctgcttatacttatgtaatcgccagcctcacaataaccaggggaggtaggtgttctgaccatggcggacacagtgcgtcccggctggagctactcggcgctgtggacgcgctggtgctgaatgagcttggtgctctggtggaagcggcggccacagtcctggcaggcgaagggcttctctcgtcggtgggtgcgcagatgctgcgtgagcgtgggccgctggcggaaggccttgccacactcagggcatgcgtagggccgttcacccgtgtggatgcgccggtgctgggtgaggttggcgtgctgccgaaagctctggccgcactcggggcaggcgaagggccgttcgcccgtgtggatgcgctggtgctcggtgagccgcgagacctgcgtgaagcccaggccgcactcaccgcagtggtagggcttttcgccggtgtgtgtcctctgatgacgcgtgagcttgaggcgctggctgaagcgctggccacactcggggcaggcaaagggtttctcgcccgtgtgtacgcggagatgctgcgtgagcgtaggccgctggcggaaggccttgccacactcggcgcaggcgaagggccgctccccggtgtggatgcgccggtgctgcgtcaggttggagcgctgccggaagctctggccgcactcggcacaggcgaagggccgctcgccactgtgcacgcgccggtgctgcagcagcactgagcggcggccgaagcgctcgccgcactcgacgcagccaaaggacttgtcgcccgtgtgtaccgcctggtgctccagcagcacggcgcgccgcgcgaagctctcgcggcactcgctgcacggaaaggggccgggaggctcgggcgcaccaggaggggccgggggcttagcgccagggcccgggggatcgccgtggatgcgctggtgctgcagcagattggagcgctgccggaagctctggccgcactcagcgcaacggaaaggctgttcgcccgtgtgcactctccgatgctcttccaggcgcgcgctgcgcacgaagccctggccacagtcgccgcacacgaacggccgctcctcggtgtgcgtaagctggtggcgcagcaggtgcgagctgcggctgaagctgcggccgcactcgctgcacacgaatggtcgctcacccgtgtggatcttctggtgcctcagcaggttgctgcgttggctgaacaccttgccacatacatcgcaacggccgcccctaaccaccccgcccccagtgctggggcggccccggctccggcccctgggggagcgccagcgggtggtgatcagagcagggcccacaccccggcagggatcctcgtccgtggggtcctgttcactcctcagatcgctggggagcagaagcgcatgcgcaaagccaccttcgcgggagggtgattggatctggccagaaaggccagccatgccgaggtcccaggggacgtggaggtgagggcttacactacctggacctgcggagatgctgcctagctgcagcgcgaaccctgcatacacaaggggaccattcattcatgacagaatgcccaccgtgccgggacccacttcatccctggggacacagtgtgaactacagggacctgaaactgaccaaagaggcagacggaggcgacaaatgcaggggtagggattctatctgtacagacttccctgatgaggtgataatgagacagaacccagcacaaggaggaagactgggctatgtgaaaaagctttctaggtctgatttaggttggaaaaaatcgtttttggaagggctgtagggcaagcgtgggggcattgtctaggtggaaaatgatggtctcagcaaatgcagggaagtgggtgggtctcggaggctggaggtggagccaacagaaagagggtgcaggctcctggatagtggtctggggtttggatgtgccttgcttgtgatgtctgtggggcatctgaggaacacagacttcatgaaggctgtggggaaacgtgagcaagggctctagggcatacacatggcacacagaacccgggcctgcaagtgatcaacacaggggtgggtatctacagaggagagaagtgggtcccagccacactgtgagcactccagcgtcagacgctgggtgaaggaggaggcaccagcaactccaactgagaatcagggcctggagaaggcggaagcctggaggaggttaaatcaagaagactgagagagcagtgagggcttttagtggtgagagaaagtccataagtcgccaaagaaaagtcagataaactagaatacatcaaaggaaatcagcaaaaaccacatcagagtcaaaagacaaatggccaaaaaacaaaaaaaattaaaaaaggacaaatggcaaaccaaaaaactctccacaggcaaaaggctaattaacctcctaagtaaagagctacaataaatcagtaagaaagatcaataacctcatagacacatgggcaaaggatgtgaacaggacaggaaatgtagctaatgcttatatcccataaaatacactccatctcctcctagtaagaaaaatgcaccttagggctgaactcatctgccatttccacaccctgactgcagggacccaagtgttcctatgtattgctggtaagcataaatgggaagacagtgtggtaaaatccatcaaaacagcaaatgtcccacactttgttcaagtaattcaatttttaggtacttcttcaacagttgtgttcctccttgtactaagtgacctacatacaaggttttcaatggtgtgtccacagtgagccacagtggggttctgtgtagctacccaaagatgtagagcacttgctgctgtgtacttaagttggaagatgcacaaaaaatgccagatgtggaacagggtggagaataagcatccatgtgtgtgttttttttttttttttttttttttttttttttttttgagactgagtcttgctgtgtcgcccaggctggagtgcagtggtgtgatctcggctcaccgcaacctctgcctcccgggttcaagcgattctgctgcttcatcttcctgagtagctgggattataggcgtgcaccaccatgcctggctaattgtttgtattttttttttttttgagacgtagttttgctcttgttgcccaggttggagtgcaatggcgtgttctctgctcactgcaaacctccatctcctgggttcaagcggttcttctgcctcagtctcccgagtagctgggattacaggcatgcaccaccacacccggctaattttgtatttttagtagagacagggtttctccatgttggtcaggctggtctcgaactcccgacctcaggtgatctgcccacttcagcctcccaaagtgctgggattgcaggcgtgagccaccgcacctagccaattttttgtatttttagtagagacatggtttcaccatgttggccaggctggtctcgatctcctgacctcatatgatccacccgcctcgccttcccaaagtgctgggattacaggtgtgagccaccacgcccagcccgtgtgtgtgtgtgcgcacttgagacggagtctcgctctgttgcccaggctggagtgtagtggcgccatctcagctcactgcaagctccgcctcccgggttcacgccattctcctgcctcagccacccgagtagatgggactacaggcgcccgccaccacgcctgactaatattttgtatttttagtagagacggggtttcgccgtgttagccaggatggtctcgatctcctgacctcgtgatccgcccgccttggcctcccaaagtgctgggattacaggcgtgacgtgccgcgccgggcccatgtgtgttttaaaggagaggaatggggctgggcacggtggctcacgcctgtaatcccagcactttgggaggccgaggcgggtggatcacgaggtcaggagatcgagaccatcctggctaacacggcgaaaccccgtctctactaaaaatacaaaatatttagccaggcgtggtggccggcgcctgtagtcccagctactcgggaggctgaggcaggagaatgtcgtgaacccgggaggcggagcttgcagtgagtcgagattgtgccactgcactccagcctgggcgacagagtgagactccgtctcaaaaaaaaaaaaagaagaggaatgggccaggcatggtggctcacgcctgtgatcccggcactttggcaggcaaaggtgggcggatcacctgaggtcgggagttccagaccagcctgaccaacatggggaaaccccgtctctactaaaaaaatacaaaattagctgggcgtggtggagcatgactgtaatctcagctacttgggaggctgaggcaggagaatggcttgaaccgggaggtggaggttgcagtgagccgagatcgcgccattgcactccagcctgggcaacaagagcgaaattccatctcaaaagaaaaaaaaaagggaatgaacatgtgtctgggaatgtctttgcttctgtatgtacagaatctttttacaaagacacataagaaacaagcagtgttggctgctggagagtaagactgtgtggcccaggcagggaaggggcattccactgtatactgtcttgtgccttttgaatttcctaacatatgaatgtattagctattcagaatagtctcctgatgaagacataaaaagacctctctgagccaggtgtggtgacttgagcctgtaattgcagctacttggaaagctgaagcaggaggatcacttgaggtcaggagttcaagaccagcctgggcaaaacagcaaaaccctgtcctttaaataaataaagcaagactccatttcataaataaatagatagatagataaacctctctggctgcaaagaaaaggcacagttttattcccaagactcttttttttttttttgagactgggtctcacccccattgcccagactggtgtgcactggcaccatctcagctcactgcagccttgacttccctggcttgggtgattctcccacctcagcctcccaagtagctgggactacaagtacgtgccaccatgcccagctagttttttgtattattttttagtagagacagggttttgccatgttgcccaggatggtctcgaactcttggactcaaacaatccacctgcctccgcctcccaaagtgctgggattacaggcatgagcggctgcgcctggctaagaagattctaaaaactcaggagttggaggtacctggtacttctggccatgcaagtgaatgagcagggcaccagccaggctggagaggctgtttcagaagcagatgctgggcagggctgctgctgtgggctctgtctgcacagaattctgagccaacagtatgcactgccatgacttacttctggatttcttctcccatcctggcagaaggctatgttaagggtgagaaaccgtactgagaaagtcagggttattaggtaaacagtcccattggatgctgagatgttaatctctttcccaaggatgctggcaggaggctgaagttaccttcttgcaggattcagacgatggaacgaaacatgcttggaggaagagtgcccccaaaatggcctagccacattgccctatggatctgtttgcagcatccactcatactcaagctgcttgctcacataccctaagaaaagggtctccttggggagtggggttcccctatgtcccttccagccagtaagccccacatctacctgctcagagctgtcagccagatttgtggtgcccctctcttgcatataagccaacaactaggagagaatagagaacacactgtttttttttaaaaagttactgctgttctcagagaaataaggaaagacattgtaaatgaaagaacaacaggagacagctaaaaagatgaacattcagagaataaaaacactcttggaaagtaaaaatatgctacaagagaccagatgaagtagctcatgcctgtaatcccagcactctgggaggctgaggtgggagcatcacttgaagccaggaatttaagaccagccctggcaacatagtgagaacctgtttctacaaaaaaataaaaaaattaaaaatgagtcaggtacagtgacacatgcctgcagtcccagatacttgggaggctgaggcgagaggatcacttgagcccaggagttcaaggttacagtaagctatgatggcaccactgtgctctagtctgtgtgaaatagtgagaccccctccccccaccaaaaaaaaagctaccagaaatgaaaatcttaacagaaggtctgaaagatacaagtgagaaaatttccaggaaaatagagtagaaagacaaaggaatggaaaattggagtgaaaagataagaacattaaaggacccatcccagatgccaatagccaagtaagaggcatcccagaaacagggagcagagcaatagaagggaaggaaataaaaaaaaatttcaaggcagtttcccagaactgagagatgtgaatttcaaactgaaaaagctcaccaacaatagtgataaaaaaaggtctgtgactgtactaataaaaagaattcttccagccaaacttcaatctaatgttgagggctagacaatgtgtttcagatatgggacatgtcagaattttatcttccacaccagaacacccacaaagctccaccaaaacaaaggtgtgaactaagaaagaggagaccctgggtctcaggaacaggaaggaacataacagaagatgggttgtaggaggagcctggatgatgccagacaaaggtggtggctgagaggtagatggcagggggcctctggtccgtaatgcttcgatgattgggcaggatccctatcctgtgtcaaggtccctcctgcccacctgctctgtctactaacctgctgtccttgtcaggtcccagccctacctgtcctgatgcctgaccagcaggatgcaagcccaggaggccatccaggataccaggactgggagagaatgtgggtacggggaatactcgccctgcttgcaaaaggttttactagggtggggagtttctagaaagtagaggggctgtgggatcagtggtagtggtgggtggctttttttgagggcagaagatgctagaggaggttgaaccttataggggatgatctagggaatgggggaacttggggatgctggagtaagagggctgcctgcgtagggccaggagtggggtcggcagagatggtgctgtccatgcggaaggcctagtcccaccacaccccatctcacttacctggggagaagatgcccccagcttcctcatgccacagggccctggggtgctccctccatgagggaccctcaggcccagtcttgctgtggggaaagatctggtccagcacggtcccacatctctgaaatcacagtggtcactgctcctctgtgcctggctgggctcagggagggacctacctgaccccacccagcaacttccagggaaaggaggagaacatggacctgggcaggacttacctgggcctcctcaggcaggagggtgggtacagactcctgggtggcagctagaggcccagactccaggaaatctagagaggaaaactggtatcaggcagcctgagtgagtttccaccccactgcccttcttagtggtgtgccaggtgctgggatgcagagaggtgggattcttggttgtgggcttgggttggggagggcagtgcagggtagctgagggcccagctcaggggctgggtgaagcagagtaccctggaaggccaggggttgagctgcagtgggatgagatgggctgaggtttgtgcccctgtagccgtatgtgaaccatggggcaaggtggtcagcgggggtcagaggtattgtacaagggtccacataggaatggcagggtgtgagcagctagttcaggtgccctgcctgggaggtgaaaggggtcatacccctaacactacgaggtcctccctcagcagctcctaattatacctctgcctgctgtctgttccccagtgacaagcacatattgcctaacgcatctccttggggactgaacaccacatgccatctgtactgggaaaccccaacagcctgctccatgccatggggttcgtgggtacagggctgtggcagtcaggcttggtgtgtgaggggtagtgacagcactggctgcggtggaggggagacctgactgggtagaatgtgggggctgctggcagatggaaaccattccatttataacaaacctggcccagtggacttcagactgactgctcaggccaggttccctggcccacccaaccagaccttaggcgcgcccaccgtgcatgccctcacctgagtcctctgtaacctctgactcctctttcacctgcaggcccagtggtgattcctgcatagtcctaggaggtgtcttgggcccaggctctggagttggaggctcagtttcaggtaggggctggaaactggagggctccatcttctctgataggacctcctggccctgcacctggactgtgacctggggaggtgcccccaccatcagaagtcctaccagagagtaaggctggccgcaacctggggtttgtgggtgcccatcccactgtaggatcccaggggcctgccttgtaaatacctactgactaggtcctccaaggacctacctcccctaggccctgagcaaagaatgaagggaccacctgcagtccctcccctgctctgacatcgtggccttccagtaccttccccatattcccctagcctgcagctcctatgtccacgtgactgcaggtgatgcaggaatgggctggggagtctggccctggaatccctctgccctgggcagccttgcacagggtctctgttgcaggtggccacttctgtaccacaagggagaacgtgtgtctggcaaagcgtggtgctgcccagggtgaggccgagctggatgatgctccagtcctgaaccccactcgtggacactcactcacccatctccggggtccgcccggctcccggcgcagcccatctactagggcagcagcctcctcggggctgcctggccgctgcccctgcacacgggcctggatctcagggggcagtgcgcccaggaactgctccagcaccaacagctccagcatctgctccttggagcgtacctctggacgcagccactggcgacacagctctcggagctgggccagggcctcttggggccctgtggcctcctcatagcggaagcaccggaaacgcaggcgtgcagcttcagggcctgggtcccataaggcagcctcaccctcctcctcagagtcctctagcttcaccatgacaggcccctcatcttctgggggtgctcggtctggggagcccagcaccgcaggcctcatagagggtaccaggtcaggtatctgaggccagtgtctgcccctggtgaagaaataggatgaggctgttgcaaaaggagtacagtgaatgcttcactgcctagtctatgctgtaccgtttgatcctcagacctaccccatgtggaaggcagatgaggaaacaggcaaagaaaggccatctacaacccacagacttatgcagctggaagccctcccttagccacctgtatccctggtcttctctccgcttgggcctgtgcaaagtctctgacagtctccctgctccaaacacaggcttttttttcttttctttgagacatgctgtcagtcagttgcccaggctgaagtgcagtggcgagatcatgcgtcactgcagacttgacctcccgggctccagagatcggcctcccaagtagctgagacaacaggtgtgtgccacgacatccggctaatttcttaatttttctgtagggatgggatcttactatgttgcctaggctgttcttgaactcctgggctcaagcagatgatcctcttaccttgacctcccgaagtgctgggacttacaggtttgttccaccatgccagcccacaggctgttttttaggactagaagacacttctctcccctgtatccttcccttcttctacatgtgcaacctcattcctgcgctacagctctctctttaccaggtggatggcacctatacacctacagcctgggcatcagcatcactgctggcgtctccccctacccaacgccagcccttacttcaccttctattctctcatctacttcgatgtggctcctcatttgggccccaccatcattcccctccctgcttggaagcctcactccacctaatcctccatgtcaacctgtgcagtcacttgtatggctcagctcccaggcagcaccctctctccctactcagccccatcttctaagcccaacatcacactacgcaatgccccatctcagcttcctgatttagctggggttggaaggggatgggggagcttcgcaatgggtgggggggcggcaaaggctccaagactgccggaacaggagcctgcaaggaagtcccgagactctgattccgcccatcttcagatcactgtgccttcgagaacttgtttccccatttgcaagtggggctgacctccctcctcgcgctgttccttctgcagctgcggctttaggaaggaatctgcgtttatgaaggggatggcaccgcagaatcattcccccgtgggtggcatcgatttcgagggccgcctcatcctgggggccaagcctccactcttcaaggtgccaagtcaacctgaaaccctgggagagacttgggtcatagccaagatggcaggtacctacggagggtcccgaaatacacttcccagaagtccaggcggcaacttccgctccagggtgccaaggtaggtccagacgacgcctaggcaaccgggggcggggctcccaaagcctgtcgtcgtggcaacgagtagtgattgacaagcctctcgctctagccctgggcgctcccgcaaggactgcccggattcgttccccgcgcttccggtctcactggggagccggaatccccgagtctgcagccaccgcccccgtccacacgatagccctcccggttaagaggaccccgccctcacctctgcgctcagcgggccgctccgcgctcctgagcacgcgcagtcttcgacttccccctcccgctggactacgtctcccaggatgctccgcgcaccagctcgagcgcctccttgcccttcccccaccctcgtccccgtttctacaccctctcctcccttcccctagcggtggtcgcaatgatcaggtcatactcctggccgcttcttcccatgctccccgcctcgaatccgtgcgtcggcatgcgcaagcctctcaggtacaacagacggcagcaccgcctaccagatcgcgcatgccccccaccacgttttcctcacttctctacgggccttcctgagattagcaggatcctgcaccaatcacggccgtcattagaactccgtcggtgccccaccgcgtctccatggcaactccctacaggaaggggcctctgctacttcctagaccgcaaaatggagaaaggcttggcccgatgctttccggcagatgtagtcagcaggcccttcgtgtgtacgtgcgcgcgcggcgcgatgacgttcctctgtgatcatgggcgaggggcgggccctgaacgtctccatggtaacctggggacacgactcgacatcgcctgggtaacccggagacgcggcgggcgttgaaaatgcaatggggcatgtgggatgaagaggtggggaagggtactggggcagagagatgccgatcgatagaaacagcgaggagagacggagagagaccagagactcaagggcaaagagagacgaaggaccggcgggaggaagagagagagagacagagagacagactcacagactgggaggaccggagactcgacgcgaggagagacagtgaaaataagtgaacaaacatagagacacgggtccaagttataagagggctgagtggatcagagggtcagggccgggcaaacaggtgtcagaacagttagcaagagagaggcagatcagaaagggatgcagatgaaagagacacaaagaaggaaacgcagaatgggttcacagagacaagaaatgcagatatccagactcaagaggtagacaagaagggagagggacagaaacaagaagggagaaaagggacagaaattagagatacagtaagatggattgacagttttcgaagacctagagaaagatgacagcacgaagagagacagggagaatccgaggtaaaactgttaggaaaacttaggagtccagatgctgtccagttatatgctaccctgtacaggttgataggttgcaaatgctttctgtccagtgtatcgctttgtagctcactaagcagttttgtatccaactttgtgcttttatttcagtgtttttctttttctttctttcttttttttttttttttttttgacggagtctcgctgttgccagactggagtgcagtggcacgatctcggctcactgcaacctccgtctcccaggttcaagcgattctcctgcctcagcctcccgagtagctgggactgcaggctgctccaccacacccggctgatttttgtatttttagtagagatggggttttaccatgttggccagactggtcttgacctccagacctctggtgatccgcccacctcggcctcccaaattgctggaattacaggtgtgagccaccgcggccggccagtgtttattcttcctttcctgtcttcctagaatcatcttgctgcttccctcagtacggtaaataaatcttttgacacatgctcactgagagtcatgtttttaactgttttgaaattatatttggcagtctgaagggaacctgttctccgggctaggggacaaacagggaaaaagaaaatagtggccgggcgcggtggctcacgcctgtaatcctagcactttgggaggccgaggcgggcggatcacgaggtcaggagatcgagaccatcccggctaaaacggtgaaaccccgtctctactaaaaatacaaaaaattagccgggcgtagtggcgggcgcctgtagtcccagctacttgggaggctgaggcaggagaatggcgtgaacccgggaggcggagcttgcagtgagccgagatcccgccactgcactccagcctgggcgacagagcgagactccgtctcaaaaaaaaaaaaaaaaaaaaaaaaaaagaaaatagtgacacatacccaggaaaggaaggaggaagggagggtgatgtaagacaaagacattaggcggcgagaaagccagcctttggtcagaagcagcttctggcgcccctggctggactctgtgcggtgcggcctcgttgccaaactacattttccggcagtacccgggacgccgggcgcagagcggagagcgtcgcaaggggcgggcctgacgcagcctcctccctgcccggccgtcgccaggcaaccttcccccttcgcggccgagatggaccctgggctcggcgtcctccggaaaactgcactgtgaggcggggcgatggggaagggccgaagccccgccagcccagctaaagcagacggctcgcactgcgacccgaaggtgaggttgatcggccgcgctggggccccggcttcggggcaggagctgcagcccctcctcttggttcggtcggggaactgggatatgaggccactgtgtccgcagctggcacgcacccgagtgggccaatcggagccttcggcggccccacggctctctgggaaatgtagacccgctacacgggacggtacccgcctaagaccatactgcgcaggtgctgatctgagtctgggtccctcctgggtcgaggagttctttggcccagatctgcgtggaggcgtgttcgcccggccctaaggtcccttgcgggccttctcggcctcacagcgcgtgtccgctgttcgttccccttccctcctctgtcttggaaatgtagtctcgagggaggagcttggtcatccacccagacttcgtgaggcccccgggcttggggctgcctgttgagagtgggagggagagaatgtgtgaatgtgtggatgaattaatttgcaattatgggagcgcaggcgaaggtgtgaatgtgggagagagaaggatgggcccaagagtggttcagatttcggggctttccccgatttcaaagcttgagtttgagccttccccatgtccacccgcctttccctgtcactctagctgagggccctgtgtgctgtgcctccttgtttcaaggcaggtgcatggtccatggaggtactcatcataggtgtagtcattccacaaagaacggtcaggcggcatttgttccttttttccttccttcctccctccctccctccctccctccctccctcccttcttccctccctcccttcctccctctcttccttccttccttcctccctctcttccttcctccctcccttcctcctttcctcccttcctcctttcctcccttccttcctttccttccttcgttcctgtcttttttccttctttccttccctccctccttccttccttccttcctttccttcccttcctttcttctatcttttttttttttttttttttgagatgggagtcttgctctgtcgcccaggctggagtgcagtggcgcaatctcggctcactgcaacctccgcctcccgggttcaaccaattctcctgcctcagccccaccgagtagctgggattacaggcacacgccaccatgcccaactgattattattattattattattatttattattatttttttgagatggagtcttgctcttgtcgcccaggctggagtgcaatggcaggatctggcctcactgcagcctctgcctccctggttcaagcgattctcctgcctcagcctcccaagtagctggaattacaggcgcacgccaccatgcccggataatttttgtattattattattactattttttttgagacgaagtcttgctcttgtcgcccaggctggagtgcagtggcagaatcttggctcgctgcagcctctgcctcgcctccctggttcaagcaattctcctgcctcagcctcccgagtagctgggattacaggcacccactaccatgcctggctaatttttgtatttttaatacagacatggtttcgccatgttggccaggctggtctggaactcctgacctcgtgatccgcctgcctccacctcccaaagtgctgggattacaggcgtgagccactgtgcctggcctgttcctgtttttcacaagcacagtttttaaaaaaaatttttactgttttgaccaggtgttacattcacatggttcaaagtgtaaaagagacaaggtgagacagacgcacaataaataaataaataacggtgggggacggcccctgtctcataaggttgtgtttgaaaagaactgcagaaggtgaggggaaaaagccatgcagataacagggaagagtgcctgctctgggccaaaggaaccataggaacaaaagtccctttgtagctggcacagtggctcacgcctgtaatcccaacactttgggaggccgagacaggtggatcacttgaggtcaggagtttgagaccagcttggccaacattggtaaaaccctgtctctactgaaaatacaaaaatcagctgggcatggtggcacacaccagtagtcctagcacctgggaagctgaggcaggagaattgcttgaacctgggaggcagaggttgcagtgagccaagactgtgccattgcattccagcctgggcggcagagcgagactctgtctcaacaaacaaacaaaacaaaaaaagcccctttgctctgtctggaagatgtggtcaggagtgagcagagtagaggaggaggctttgagtcttacaaaggaggcagtgaggactgtggcttttacttgaaggcctgggagggctccaacagaggtcaggatctgacttagtttcactgaatcattcttgatctggtatggagaaccatcatccccttctatcattgggtactccacggtggtggtaccaattagggacggccctgcaggatgtacctgggtgtcctgccacctgccatctgtgtctgggtggagccccagtgccctgagagcagtgaggaggctatggcgctggtggaggacttcacccagatgttgaagactggtgagccacaggggtccaggggttggccagagggataggggaatctatgagggatcacagctcatgaccttgggccctgagtgtctccctccgtctgcctaggccctcaatatccctgtcttggggaggaggacctagaagctgtgacgcatttggagacttctgcagcctctgagccccccaaaggcatgagcttgaggttgatgtgacttctcctctcttggggtagaccaggcttcctttcccatccttctttccttccccgcaaggtcactaagtgcctgccatatgccaggccctattggtccagcagggaaagacacttggcattcatggagcctagtctggttggagaaatggaccatgagaccatcagtcacaatttaggtatcctttccctgaaggaggtgggggaagaggaggtgagcacagagactggcctggcagggagcagctttgtagttttcagtgtctaacatcttcactgtgagcttgggttccacacgtgtgtatgcgtttgtgcttgggagggggtgacaactacaagatatgagagaagggtggttacagccaccattcatcctggcatttgttcctctgttcactcgattgctcatgcatgactgtgcagtgtcttctgcctacgcgattctctgtcaggaggtagaaactatatcacctttttttaaaagcacacctttaccaagttataattgacataccaaaaaagtatacaattcaggtatttttagtatattcacaaggttgtacagctatcaccaccatttaataccagaatgtaatcacaaccaaaagaaaccccatgcccattagtagtcacccatcagccccctcctctaagctcccggcaatcactaatctgctttgtgtctctatggatttgcttattctggacatttcattaaatggaatcatactttatgtggccttttatgtctggcttctctcagagcataatgttttcgaggttcacccatgttttaacatgtcagaacttcatttttatgagcaagtgatattccattgtatggatatgacccattttgtttattcatgtattctttgatcagcatttggcttgtatttacttttcggctattatgaataatgctgctatggatgttcatgtacatgtttttgtttggatgtttgtttttatttctcttggttgtatacctagaagtggaattgctgggtcatatgataacactatttgaccttttgaggaactgctaacacaccacttgttttaacagagggaaattaaggtaaaaaatgttaccgagatattgaaggagtaaaaaagtacaaaaagaaccctaagatgtcatgttggtaggaacttcagggaacaacatccattcctagagctttatgaacaaagggaagaggttgggtttagtctttgagagaagctcaaaggaggggaacgtggtggtgggggcactgggatccagatccctggggaggtgttgctgcgggctgacgctggggtctccacagagccttcatgaagctgattctacacatactggaatagctgcaagctggtttcagctactgctaaggggattgaaagccttgcttttgcaggactggtttttccttacacatgaatatgaggggcgggggagacatcttggatgcatatatctatagtcactgtggggtgttgtttttttttttctgtagtgctgggctctattttctttccttccttccttccttcctttccttccttccttccttccttccttccttccttccttccttccttcctcccttccttccctctttctttctttctttgatggagttttgctcttgttgctcaggctggaatgcaatggtacaatctcgcctcactgcaacctccacttcccgggtttaaccgattctcctgcctcagctcccaagtagctaggattacaggcatgtaccatcacacctggcttattttatatttttagtagagacagggtttctccatgttggtcaggctggtctcgaactcctgaacttgggtgatccgcctgcctttgcctcccaaagtgctaggattacaggcatgagccactgcacccagccatgggctctgttttctaagcatgtccaccagcatttgaggcatagtgtctcctgaacaatagctagcatatgcctgctctttaaggactagcccccagttctggttcccagtgtcccattgaacagatgcctagataatatgcactctaaatagggattttgggctgggtacgatggctcacgcctgtaatcctagcactttgggaggctgaggtaggtggatcacctgcggtcaggagttcaagaccagcctggcctatatggtgaaaccctgtctctactaaaaatacaaaaattagccaggcattgctgggcgcggtggcttgcgcctgtaatcccagcaatttgggaggctgaggcgggcgtatcacctgaggtcgggagttcgagaccagcctggccaacatggtgaaaccccatctctacttaaaatacaaaaattagccgggcgtggtggtacgcaccaataatcccagctactcgggaggctgaggcaggagaaatcacttgaacccgggaggcagaggttgcagtgagccgagattgccccattgcactccagcctgggggacaagagcgagacttcatctaaaaataaacaaaaattagccaggcatggtggcgggcgcctataattccagctactcggaaggctgaggggggagaagttagggttagggttaggctgaggggggtgatttggaaacccgatgttcagtgtgaggggcagggaaagcttataaagtcctagtgtgtttacagaagcttgctgcattcctgagagtgaagttagtttagtgtatggggcaaacatccactgggaagtgagccctgtgaccctaatatggcccgaatctgctccttaaagagagagacttggtaaattatctttaccaggtgttacccaagcctgtcagcactccccaccagtaagccttgtgtcctcattttacagcgcgagtcatggctggggccttagtggcaacaagtgctgagatcagcgggctcagtagcaggaacacaagcacccccttgcggtgtctggaggaagcggcgcggacagtctcccgctccaccgtgtcgggcctgaagaggccgctgaacgctcgcgattactgaggcatctggtaggatcgcaaggccatcaacctacaggtgaagctcgaggcgctgtggcgctttgaagccggagagaagctcagtagaatcgggaaggcgctggggctgtccaactccaccttggccaccattcgtgacaacaaggaaaagatctgggcgagttcccaggaggccacactgcaggcggccaccaagttgacgcgtggccgcagcctggtgatggagaacatggagcagctgctgagcatgcggatggaggaccagagccagcgcaacatgcccctcagtgtggtgctcattcgggagaaagcccacagcccgttcgagaaccgcaagcaggagcagggcgagggcgcctagcccgagagcttcggggccggtcgagggtgattcgctggctttaaggcgcgccacagcttgagcagcatcggggccagcggcccaagaacgcagcgtgcaagaatccagcgttaatgcgcagggtgatcccggagggcggctacacactctggctggtgttcaccatgaataagctctggctggtgttcaccatgaataagcccaggttcctctgtaagcgcctgccgagaggacgttcattttcctgtggaagatgagtcggcccctgggtcaaagccgccggagacctcctgaccctattgctcggtggcaacgcagccggcgacttcaagctgaaggccctgctggggtacccctcggagaacccgtgtttcctcaagggctccttcaagcccaacctgcccttggtgtggtgctcgcacaagaaagcctgggtacagcctgggtgacagagcgagactccgtctcaaaaaaaaaaaaaaaagcctgggtaaccatgagcctcttccaggagtggttcctgcacttctgctctacagtggagggcgctgcacccagtacgaccttccctacaaggggctgcccatcctggacagcactcccggccaccctgggtgttgagacagagtctggctctgtcgcgcaggctggagtgcggtggcgcgatctcggctcactgcaacctccgcctcccgggttcacgccattctcctgcctcagcctcccaggtagctgggactacaggcgcccgccaccacgcccggctaatttttttgtatttttagtagagacggggtttcaccgtgttagccagaatggtctcggtctcctgaccccatgatccacccgccttggcgtcccaaagtgctgggattacaggcgtgagccatggtgcctggccctttaattcccccaatatttttttatctgcattaatttattatttcaagtgaacttccatctcaaatacatggttctcagacgcttccatgaactctcaagtgtgacttattacagcctggggctccttggagcacagtgtgccagtgacctagtggaaggccatgagaaagccaggttcactgttcactgtgcagcatctccctccatggtcttcctggagcctattcccactgcactgagcattccgtgtgtccagaggtagggttagcagggatagatggacttcctgcttattttctgttcacatttccactgaccttcaatcctgtagactgcaaagattgagccagctgagcccccaaagagactcagcagtgcagaatgtgggcctgagtgggaggactgcccagccgcacaccttccagctctgttcttcccgggccctggatgcttcttgccacgctgtcctctgaaatgacgctctgccccagcagacctgtggtaggtgagctagtgaggaagcacacctgggctcttcccaccaggcatcccagccctggtgtggggtatccgcatggttgcaggcatcccctggccaggcctgggtgctcattctccctctctcttcttgtctcctcccctctccctgctttctctgccctgtcctcctcctttttgctgttttcccccggactcctgccatgcccccagactttctttttcccacggatatgggctcattccaaggaaagggtggcatttggacacaaggccctagatcccacgatggaggactggggggtacctgatgcccctcagaaagaggcctgcagggacagcacatgggaaagccccatggctttgtgatccatctggggatgtgatccatttgggtaaggacttgggtttcagggcatgagttggcttccttgcaggatgcaggtccttaggtgggtggcctctgtctccagctgtagggccctgccaggaagcctctatatgagcctacctccctcctgcaggaccagagaggggttgttatgaacagcccaggggattggttgcactaagcttgtcttgaagctttggctggggagtccaggtgcccatgtctctcacctgctccccatacacatctctgcacacctggctgaggcattcccagacctaacctcagataatgtgcatgtgatgaacactcccaagtggctaggcctcttgcacctgagcaggtggattctgccccagcactggggctttctctgggctgtccatcatgggtatatctctggattccaggattgctagttagcacctcacatttgagggtctgtgctattcagtctagaatcagagttggatgagaaatcaactttgaacaccacctttggggtggctgcattggctcacacctgtaatctcagcactttaggaggctgaggcaggaggatagcttgaggccaggagttcgagactaaccggagcaacatagtaaggccacatctgtacaaaaaaaagaaagaaaaaattacccaggtttggtggcatgcacttgtagtcccagttgtgggctgaggattatgcaggtgacaaggcaagagactgaaggcacaaactgtttcagtataataaagaaaatagaataataatagtcataattatatatagagatgatcatgaacaattatcaatcattataataaacattattaatcattagcttttattattactctttgttgtgttactaatataacctaggaataaacggtgtgctgaagggacattgtgagaagtgacctagaaggcaagaggtgagccttctgtcacactcacataagggctgcttgagggctccttggtcaagtggtaacgttagtgtctgggacagcaccgttacttagcagaccacaaaagggagtctcctttccttgggggagtgagggaacactctgctccaccagcttcttgtggaaggctggatattatctaggcctgcccgcagtcatctggaggccgaaacccctccctgtggtgctgtgcttcaatggtcacgctccttgtccactttcatgctcctctcacactcctggttcctctttgaagtttgtagtagatagtggtagaagaaatagtgaaagtcttaaagtctttgatcttataagtgcagagaagaaattgctgatgtatgctgccttctctctctgcttcagctacctaaaagagaagggcccctgtcctgtaatcacatgacttgcttcaccttgtcaatcacttagaagattcaccctccttaccctgcccccttgtcttgcatgcaataaatatcagtgagcccagctgttcggggccactactggtctctgcatcttgatggtggtgttcccccaggcccagctgttttctctttatctcttcgtcttgtgtctttattgattacaatctcttgtctctgcacatagggagaacaccccctaagccccgtagggttggaccctacatctagttactcaggaggctgaggcaggaaggttgaagttgagcccaggaggttgaggctgcagtgagccatgattgtggcactgcactgaagcctgggtgatagagtgagaccttgtctcaaacagcaacaaacaaataccatctttgggtatattaatcagatggggggagtcacactgacatcagttggcacccactggttagtgtgtgccaggcagggagactgggctgttttcagtaaactgatcacagcagtgagctgtgatcgtgccactgtactccagcctgggtgacagagtgagaccttatttccaaaaaaaagagaaggcattggagttcagcttgtggttttgacagagaaataataggataaattaatgaaacaaaaaagttaacagtagaggattaataaaactaagttttttttttctaatttcttttcctttcctttcctttcctttcctctttccctttccttccttcccttcccctccctccctccctcgctccctcccttcttcccttcctacctccctccctccctccctccctcttcccctcctcccctcccctttgtatgtaagtgtagatgagggtgtctgtgccttgtgtttgtatatgtgagtatccacatgagcatgcctatgtgtatgagtgtgtatgtgagtgtggtgagttgcttctgtccacacatttgtgtatatgagtgtgcatgcaagtgtgctgagtgtgaaagtgtgcctgtagacatgtttgcctgtgtgtgcgtgtgtcaaacacagctgtttctgtgtgtgagtgtgccttatctgtgtgtgtgcacgtgtgtgtgcacgtgtgcacgtgaatgtgttgagtgttcctgtgtgaacacaggtgtgttcctatgtgtgttatgtgagcatgtgcatatgtgtattctcgagggctgagggacccagccctaccttcagcacctgctaactgtccccacacccacagcgggcccagcacagggatcacattgtcggggtgacctggatcctacttgaagcctttgagctggactgtggctttatccctgaggccaggcttcatgtccagatggccatgccagaggttgacgtggcagagaaggagtgtgacacaggccagtggagcgagtggagccagcctgtgtgcttccaggctccccagagacaaggtgggtgcttctgtggctgctgcacttccagaatctgggctgggtgtcttctcccatgatgacctcactcctccaacctttcacactcctggaagcccctccctgaggcagccatgccccagttgacttgcttcctctgaaggtctgaggtctatagggaggacacaagctcctgccctaacacatctctgcacacctggtggtcttaggttagggttagggtcagggtcagggtcagggtcagggtcagggttagggtttagggtcagggtcagggtcagggtcagggttagggtagggttagggttagggttagggttagggtagggttagggttagggttagggttagggtattgtaaataatttcacattactaataataaattattatttgtattacactattacgtaatgtaaaggctattaagacatgtttgtcttcaaagaatggccttggtttctgtgggcagtgtcctcatggaaaggtaatgcgttcctgctaaatcatggacaaaacgggcttccaggagctacaggctgcagcagcagcttctcctctacgtccttcactgcctcatactgttgttgactttgaaagcttttttcagtctagttttatcaacagagctagtattttcatgaggttctactacataccaggttccagaaagctaaatgccttttgtttgttattattcactaaatagaaatcacaactctctcctcattactcacacaacaaaatttagctgagggagactgagtgactgtcccagggtcacacagctactaagagcagagtcatgtttagattcatgtgggaatactgaacacagacatgaaccagtggaaacatcctacgttccaaaagcctactcaagccatttgttcttattttaaggaaaatctttatgctaattttaaactccaaatacttatgaatggcagagatctacagatttgattctgatgtaagaaatgatggtcaccagctggttactgctaccaccccacaaccccgagcatactggacgaatgtctaagccttgtggttagtggggacaatgctggtggagtctgaagttgtcatgcagtgactcatgcaagcttaggcagatttggtgatatatgacacagagatgcaaagaaatgttgtagctgacacacaccggctggctctgggagatgcagaaggagcacgtcacccaaaatagagccagacagacatccttaaggaaagagccaaggggctgcatcttaaagaatgaagaaaggatttgtcatgagagatgggacaggaagttcttgagaggcagagggagattgtgagaatgttgggaagggaggagagattctcgcacatctgggaagctgacaatccatcagcatgtccagaaggaaaataaggaggaggagcagaaatagatgaggctggatatagaagcagggctgaagctgtgtcgattgtggtaaagagttgtgattctatccagaaggcaataggtagcattctaaacagagatcttttaaaacaagagtcagcaaatattttctgcaaggggctaaatgttaaatatttcaagttttccaagccatatggtctctctctcaatgactcagctcttccattataccatgaaagtagccagagacattatgtaacacatgtattggctgtgccccattacaactttacttacaaacgcagactgtgtcagacatggtccatgcatggtagtttgccacactctgttttagaaagctcaggtttatgatgtgatggagaatgcctacaagagctcttgttttaaatggtagagtgaacatacactggaattctatcctgcttgacccaagctcttgatagcaaaaggtagaaaagatagatggtaaacagatagatagatgatagataaagaaaatacatagctgttccagaaaacagaaatggataacttcatgaaccaaaagcagagtaatatactttagaaggaagcaggccagaaaacccacagttgcaaagcaaatagaatttccagctgcctcttgtagccccttcctggaagtagtcacagcccagggtgtttgacttcttcctctgttttttgtttgtttgttgtttgcttttctctggggtttttgttgttgttgtttgctttttttaaaaaaaattccctttccctgcttttttgtcacagtagcctttgtcacttcaaacactgcaagtgttctttaaaaaaaattatatcaacctttcaattaaaatgcaacatgtctgaaacttggtatctggagaggtgagttggacaaaggagcccttgttactgcacgttttcattcttcaaatttcaccttgcacgcagtaacagacagtgcacaaagccacttccttatggacggaaattctgaaatccttttatgcctggcctttccatccttcatcttcccctctctcacactgtgaaggatcgtattggacatttttgttttaatgtcagtgacaggggaacacaggtagctctaatatagctgtgacccagatgcttctgtttctagcacgtatttattttgcagcaaacatttacatccatgatgttttactgtcttttgaaaataattaggcaatatctcatctgaggtaggatgtttctaggggttgtgttctgagggaggaaaactaatctgttctctttccactgcattctaggaacagtaagaggaccttgtgcatgaataatttgtttccacactacagagtgggtaataagcagattagtaaaaacaattctgcttcacttcaataacagcctcctccaactcattttttctcaacaaacttatttttccagcagaagaatcccagacttcttagagaacccagtgactttttgcaccttaaatctgtgaaatcctcatgttttcttctgccgtatccatagttcaaacaaagatgaggcaaagctagatgcattcctgaaggaacccaagaaattcctctctttatttctctggaatgaaatgaattctctagaccaccagttctaaccttcaaaaaccaaacctgtttgtgagatctccttcaaatactactgtagaccccagtgtttattcattaaatttttaaaatatttgttttatttggaatccatgtatttgtaattttagtgtttgtattaatacaagggagaaatgtttaaatctgtctatgccatatgtgcctctggcttattgcccaattaattgtagcctcaggctaaactttggtttctgtctttaatttttgtcagaagaaatataactgatctcaaaacatctgcttttattgtaggggctcgtgctgccatctccattcctctctcttttcttgcaatctgggtggaagttctttaatatgaacatttcaaccaccttcattctaccatgtccactatcagcacattcaaacttatccagccaaggctgtcatcttaggccagggattttttaggaatctattatgctgtgatgcggctggcacccctttgactcactgtatcaccccagggttcttttcatttcagaagcccaagagggcagaaaaagaaataggtgagcaattaaaccctctgagtcaggagcgtctccccttgcgttaagcaatgttgtagaacatcgtgtttagcaagctcctagcagatgagccacgtggctgctgagcacacacgcctgcttgctgctgtgagctcaggcaccatcatcatgtcttttccatctctggagggaattgtaagggccacttaataacctgtaaatcacagagagttaaaggtgcttccccaaaacactgatgacagaatgaaaggtgaggagtgttagccacaggtcacaaaagtgcaggaaagtctctcagtgtgggttgttgaagaaatgcaggtcttttttcttttggaagtctccctagaatggggtcaaggactctgcccattctaggatgaaaaattgggatattagacaccttcagatatttatccccagctttcattttgggctcttaattagtttgttcatccatcacaatctcaaatgctaagcagggcatttgaatctctccacagtgcaaatcagcgccgtcttttaaagttgagtttcttattattctcacctgatataccttatttatcccacacccaccccaataacatatcgtgctcactgttatctttgaggcaacccttgaattttactcagcctggagcgctcttcacgtcttgtccagagccagttcggactcattcttcagccgtgcatcagtcagtgggggctagcttaaactgtggtgacaaacaacctccaaatttcagtggctcaaaaatcttcttccttatttatttacatctcatgactggtcaggtgagaggtagctctgtgctgtgtcatcctaacacaggaatccagaaggaaggagggaccgtcaatgagatccccattgctatagaaaagagaaaaaagcatgcggaatagaacgctgtttcttggagatttctcctgaaaaagtcacatgttatttcttctcacctccatcggcaaaaaaaaaaaaaaaaaaaaaaaagtcatgtggccatgggaaaatttaagtaggtgggatggaacagtcagaatgcattcataaaaaataaactgaaaatatttggagaacagcaccaatgactatcatgaatgccaacttacatccctaacaacccagtgctgttaccctccaaactttttatgtcttgcaaagtattagaacttcatatctgaagccataccactcagagggaatgcaagatacatattgacatctcctttaggatgtccatagagaattcaagaaaagaaataatttaaaagtgcttttgggtacagctatttagcactagagggtaagagtagagatagattgtaaagataataatagggttaggcataggattaggatctgggtcagagtcagggctggaagtatggttagaggtggggtcatggtcagggtcaagatcaaagtcagggttaaagtaagggtcagaattagggaccagggtagggatcaggatttagcttcaggctcaaagtcttgggacagggttagggttagaattagaaccagagctttgttctcaggacccacccgaggatgggtcaccatggctttggagcacctggtagtgtggcatgtccacagtgaagaccagagtttcgttgtccttaagactgacctgggagacgtggctggaggccattgaggaaggtgaggcaaaagcttcctgtctgctccccgtgtgctgaggagggagctctgccatgggctttactttcacacgttatattctacaagtcttgttttacaaaagcatcccttccttgaggcttcggctgctcatcgctgctcatcatcatagcgtgccataacatatagtaagatttgggtttgtttctgggagagatcttggcatagagaaaggagaaatgcttagagccaccatcaagacagttgggatgaaagctggggataggcagaggctggaggaaacatgtgcaccccttgtaaacacttattcatgttttagttattcacttaaagtgttaaattagtaaaaatagtattgaaaaattgaaaagtaggcatattaaaacttgtaacactatttaagcttagatatattatttgtacctcatcaacattttttattttgttgagaaagtgtaaggttaattggcagcatatttctaatagtagatagaataatgtctgttttataaacattgacatcctacattacatgtgtgaaccctgaaaatctgagacagctctcagattttttagaaagtttattttgccaatcttgaggatgtgcgcccgtgatgcctccccaggaggtcctgacaacatgggcccaaggtgatcggggcacagcttggttttatacactttagggagacatgagacatcaatcaatacgtgtaagatgtacattggttcagtccagaaaggtgagaaggccagacagggggcttccaggtcataggtaggtaagagacaaatggtttcattcttttgcattgctgattaccctctccaaatgaggcaatcaggtatgcatttatctcggtgagcagatgggtgactttggatacaatgggaggcgggtttgccctaagcagttcccagcttggcttttccctttagcttagtgattttgattcccaagatttattttcccttcataaggttttcctatgagcattaattattcattgtgtattttatcacacaaataaggcacagatttttaaaaaatcatcaacttcctggctacctatatagacataattacatagaagctcaactaaatttgcaaacattccagagtttgggtttccaataattctttgtgattctttaaaaggtaaagtatttttttcccataaaacatagcaacatttaaaatcacccgtagaatgtcctgccatttttgtttctgtagtttcctcattttctgcaaagcctcgctgaggaaattgactttgaatatccttttacactcttctgttttagaaagcattgtggtaaaacattgaatcatcatggtcataagttctgttcacattctttcttgctttgaatattttttcccagtggccaatatttgattctgttgtatcatggctaaaaggtaggcatggcaacaaaataaagacaggaagtctttggaataagtgatcccatcacaatgaatcaatttgccattggaacatatttttacaaagtcactcttttgaaaatatttagctatgaattaaaacagagtctgtatggttaatatttttcctggtctaaggtgaacagcattttagagaatgaactcaggacacaaccacagcacaagaaaaatgtgataattaagtttacacatatgtgttactactgcaacagaaaacatgtaaagaacatttgatttatgtatcagtctgcactgtttaattttttgtgtcataaatactcttatttaaaaaaacaggactagttaacagtgtcaattactagtaattcatggtataaataattaaacaaggaagtgttcaaaaaaaacagtgttttaaataaagttttattttacatcatcttttttacttacacagaaattgtcaaaaaaaagcagagatttcccatgtagccgcaacctagtttcctctcttattaacatcttctatcagtgtgtctcacatggcttattaatatcttacataatttgtcacagttaatgaaccaatactgatagactattattaattgaagttcatatttcatttggattcccttagttctatcttactctgacccaggatcccatccaggatcccgcatgacatgtagacatcacgtgggctcttcctggctgtgacagtgtgtcaggctttccatctcatgatgaccttcatagcactgaggaggattggtcaggaatgttgtagaatgtcccccattgtcacttcatgttctcaaggtgaactgtcacctttgatgttcacttggatcatttggcagagctaatgtttgtcaggtttctccactgtgaggttatttctcctccttgtccgtactgcatgtgttcttttggagcaagtcactatgcagagcctcactctgtcaggagttggctccaccttcttgacggctgagtgtctacatcaattatttggaattcttttgcaaaggagatttctatgcaactccatttgcttattcacctaggtatacaaatacagacacctagataattactttaagctttagttattattcaacactacagtattatgttgcacaattcattcctgtgttggccatcagtagctgtttttattggctcttatttttctttgatatgttttaatttttttagtacttactttctgatacttccagattatcctggctcctatatttactgtcccagttctagtatcagacatttcttcaaagagcctgattactttcagaatggtaggaaaacttacatctggctgctgaatgagcacattgtatcttctccctcattggcaatgctaggaagtatatgtgtgtgtctaacctacctatacacacctaattataaagttttctatgtagaactgtgtgtgtctatattaaactaaacataagtttacgttgatgtctccacctctgatctactatcacatgaatcattctagccttctcgccttgctaatttgtaacctcccacttcaacagtaagaaacctggttcccaccatctgtgacttatgtaagtcattgttttattccagatacagacactgtggttttacaattgttcacaattgcttctgttggaaagaactttataaaatggaatccaataatgaagtatagttcatgtgccttcagcctacagattctattcattttcaaagtttttacctagatttgtgtcttagtccattttgtgcttctgtaacagaatacctgaggctgcgtaatttataagtaaaacagtttcatttgtttgacaatactggtggctggaatgtgtgagattgggcagttgcatctggtggggcctcagtctttttcacctcatggtggaaagtggaaggggagcaaggggtgcaccagagatcacacagcagaagtgaaagcaagagggaagccaaggaagccaggctctttttaattacctgctcctgcaggaattatctattcctgtgagaacagaactcactcacccccatggaggacattaatctattcatgagggatccgtccccaggacccaaacaccgtccactaggccccaccgccccacactgacacagtgggagtcaaatttcaacatgagtttttgtggggacaaaccacatccaaaccatagtaatttgtagcataaattctttttcacatgatgtattctgtcctgggatactccacatcctgagtaatttgatttaatttgaatagagtttgctttaaccatttggctgtaaaattctgcatatttcgacaaatgcattgtggcagatatcccactattaaagtatcatatggaatgcctcaaacccccaccccatggagccaatggcttcccatctgtgtagtttgccttctccagtgtctcattaaatgaggtcacactgtgtgtatcctcctcagactgtcttcttccacttagcaatgtgcatgcaagattcactcatgtctttgtgtgtgttgatatcttgttcctttctatggctaaatagtattccattacatgaatgtagcagaatttggttatgcattttggggagcagaaccttcctcttctaactttgttccagggttggagaccttcaagttaactgacaatagatacattagtaggagagacaatacttggcttcttgttccccaagcatcattgtgggacaaaattcatcagatggcaggatccagtttacaaagaggtaaaaatagcccagaaacaagaaacaagactagaatctgataactcacaatggctatagttttcctttaaaaaatttttttttgagacagggtctggctctgccgcccaggctggagtgcaaaggtgcaatctcagctcactgcaacctctacctcctgggtgcaaacgatcctccctcctcagcctcctgattacctgggactacaggcacatgccgtcatgcccatctaatttttgtatttttggtagagacggggtttcaccatgttgcccaggctgatgttgaactcctggccttccaaagggctgtaattataggcatgtgccaccatgcccggctgtgttatacttttcctttgaaagataaaatttctctctgtagtaaccatcatttttgatcataatcaaagtaagactattcttgttttaaaaataagtctagttttgttagattttgcttgattatttacgtaagtgcagcaagaacaggagatgaccacgtaggtgctttcaggtttctttgctggaagttttcatacagaatctcagatttgacttttaaaggccttattcaggctaaaagccaagccaagaacatactatcaaatttcagctgcagtccttatagctttgtgtgaattcctctcttcttgaggccccaaaatatccctaaattcctgggcctaccaggaaatgaccttccttactaacctataaggctgtgaaccctgtaatctaggtatcaggctgggttttctcagagtgctgttgggaatgaagttttttatgttcccccccccaaaaaaaagaactaacatgggaacaaatgatctcttagcaaggcgagctttatttttctgcacaaagggtgctactcaatagctgtccagctacaagagcacaccaaacaaaggagacagagttacttataacctgacgtgtctaccctactgctgtgtccagtttccattggctggaataggacctcccattttacactttacccgattggctgttagtttaaaactttcttaattaggtaaggggaatagaagaaagaaagaaaaggaagttgcccagggatagttaaggaagcacctccaaataaggaatggcatgcactatgggctggggcttgtctagttctgtccaggcatgctggagcaagctaggacaagtgatttggaacacacacacacacacacacacacacacacacacacacatataaaaatagtgggtagttgtgactttataatctttgaggaagaactttcctcaaagttttccacagtgctttgtaagcattgtctccataaaagtcaaccttacttccttaaaattgctggtcataactgatcttaggtacactccctaaatatgatattccagtaaaaaccttgataatataaccaaaatttccaattatgtcctgttataagatgaatagattcttattggacttttgctaacaacaatatcatcgtggaaataagagtattcagtaaggatttcaaaattctggaaaaatcaggcaagaaaaaaagataaacgcttcatttctgtttacaaaagtataatctactaaattgttgtaagttacagttagagtaagagaaagagatttcttaaatccagaaactagaatattaaccagcaatgctccaaaaagctatacaattataatcaattttcatcagttcattcagtgccatgtaatcaattccagtcttgtggatcttgagttagcagtgtcatgaacccatcagtttcccaaccggacttctggagaccttaactgagtcaagtgtatggtcttaaagttatttaagcaatatcatcagaagcctataaccagagtacctgtcatagtcttttctgtgagtctcagggggagtcctgtcttggagacgaacattctgacctgtagttgattgcaggagctttcaggaaagcatcagggggaaataatatctaaatgacaaaaagtatgaaatggctgtgatgaaagatctgatgagagttcattataccacagctgacaaggatattcgattttttctgtggcagacaacatttatttatttatttatttagagacagagtcttgctctgtcgcctaggctggagtgcagcggtgcgatctcggctcactgcaagctctgtctcctgggttcacgccattctcctgcctcagcctcccgagtagctgggactacaggtgcctgccatcacgcccggctaattttttatatttttaatagagatggagattcaccgggttagccaggatggtctggatctcctgaccttgtgatccacccgcctcagcctcctaaagtgctgggattataggcatgagccactgtgcctggcacaacatttaaagtaataattggaattatgactcattactctatagtggcacatagcatggataaggaggacattgacaaacttccaggaattttatataatttctgaaaacataacattttacccatacaaatataacacagggaaggttaggtatctctttttatttgtatcttctgtatggttttccttataaaaaatgcaacctactttacttgcgaaacatgccctacttttcttgcatgctttgcatagagttgtttctagttattctattatttctagtagttttatttacatatattgattataattttaatacttagtaatcttttattttccagagaaaactaggaagtagacagttataaactgtcatatattagcattctatagtaggttagaaaatgtatgaatataccatctcccaacatctagagggatgtgtttcctcataatacaattcctcagtgtggcagaaaaaaacatgtttattaacgggccaaaatatctttagtctctctgtaaaaataggaagccaaaagtatataaacttgaattatttatgttcagtaattaatgttttagtattgtatcttatttataaatggtctagatatttaatgcaaatcttttacttagcttaactttaaggttaaaaattaccaaaagtactttggaaactattcttaggcagatttactgtaaacaaattatttttgaaataatgtttttcgcttttcacaagacggcaccgaaagcgaaggaagctcctgctcctcctaaagccgaagccaaagcgaaggctttaaaggccaagaaggcagtgttgaaaggtgtccgcagccacacgcaaaaaagaagatccgcatgtcactcaccttcaggcggcccaagacactgcgactccggaggcagcccagatatcctcggaagagcacccccaggagaaacaagcttggccactatgctatcatcaagtttccgctgaccactgagtcggccgtgaagaagatagaagaaaacaacacgcttgtgttcactgtggatgttaaagccaacaagcaccagatcagacaggctgtgaagaagctctatgacagtgatgtggccaaggtcaccaccctgatttgtcctgataaagagaagaaggcatatgttcgacttgctcctgattatgatgctttcgatgttgtaacaaaattgggatcacctaaactgagtccagctggctaactctaaatatatgtgtatcttttcagcataaaaaaataatgtttttcataagaatgacaacttaattagaatcaaatctataagctttaagattttacgtttctagtaagtataatattagcttatttgactagaactcaagcagaataggaatttatgcttgttttatattcaataatgataattttgaagatatagttgttttattacaccaaaaatactatattaatcttatttaactaagttttatccaaatcatgttaacttaagaaacatttgatcagttcctatatttctaggagtttggtgaatatttatttataaatgcttatttttttccaagccaagttagaatagagcacttttagaggatttcataaatgaattttgtaatgctctctggagttaagaaaatatcacatatacataacatacattaatagatacacaaacacaaatagagatttcatagctttcatcctgaaatttcagccatgaatcaggcataaatattctgatggttaatttcagacatctacttgatcggattgagagacacacatagctggtcaaacacgatttcagccatgaatcaggcataaatattctgatggttaattttagacatctacttgagtggattaagagacacacatagctggtcaaacatgatttcagccatgaatcagccataaatattctgatggttaattttagacatctacttgagtggattaagagacacacatagctggtcaaacacaatttcagccatgaatcaggcataaatattctgacggttaattttagacatctacttgatcggattgagagacacacatagctggtcaaacacgatttcagccatgaatcaggcataaatattctgacggttaattttagacatctacttgagtggattgagagacacacatagctggtcaaacacaatttcagccatgaatcaggcataaatattctgacggttaattttagacatctacttgagtggattgagagacacacatagctggtcaaacacgatttcagccatgaatcaggcataaatattctgacggttaattttagacatctacttgactggattaagagacacacatagctggtgaaacacgatttcagccatgaatcaggcataaatattctgacggttaactttagacatctacttgactggattaagagacacacatagctggtcaaacacgatttcagccatgaatcaggcataaatattctgacggttaactttagacatctacttgattggattgagagacacacatagctggtcaaacacaatttcagccatgaatcaggcataaatattctgacggttaattttagacatctacttgactggattaagggacacacacagctggtcaaacaatttcagccatgaatcaggcataaatattctgacagttaattttagacatctacttgagtggattaagagacacacatagctggtcaaacacgatttctgggcatatctatgagggtgtttctggaagacactgagataaccatgacccaatgtggatgggcactgatatggtttggctgtgtccccacccagatctcatcttgaattgtagttcctgtaatacctacatgtcgtgggagggacccagtgggaggtgactgaatcatggtggtggttaccgccatgctgttctcatgacagtgagtgagttctcatgatctgatggttttataaggggcttttcccctttgggtcagcacttcttgttgctgccatgtgaagagggatagctttgcttccccttctgccatgattgtgaggcccctgcagccatgtggaactgtcagcccattaaacccctttgttctttataaattgctcagactcaggtatttcttcatagctgtataaaaatggatgaatacaggcaccatccaattggttgagagcccagatagaataacaaggaagaggaaaggtgaattatctccttctgaaatggaaacatccttcttctcctgcccttgacatcagaacttcagggtctcagacctttggcctcacaatcagagttacaccattggcttccccgattctgagtcctttgtatctggagtgagccatgctaccagctttcctggttctccaacttggagacaggctattgtggaacttctcagcctccataattatgtgaaccagttcccctaatgaatcttctctcatctatctacatatatcctattgattctgcctttatggagacccctgcctaatgtgattacaataactacaaaattcactagtttatatagaagacttggtttttgtctttgccccattttatatttgtattataactatgtatctggaaaatggaacaagttttttcttctttatatgagggctaaggcttttttctcaccaatatttttggagattttaaagattttctttttttttttgacatagaatcttatggaggctgagaaataattttttttctattttattcttcagccccaggtgtttgcttttgcagattcttgagcacattgagagcctccaaggcatggagtggggtgcctgaagtttcagtgattatagggagttgagagactcaactgggaaaggaaaggtctaaaaggaggcaatttggaaaataaaaattttctcaaaggagccattaaagttgtaaataattcttagtaaagtcatgcaaacaggaaaagaagtagaattagttccatattggtggaacacatagtcagcagaggttggagaagggagaatttagtgaactgagaagttcccatgaaagcagcaagatcaagatcacagagacaccttgaaacaaaaagccaggaataacttccaacccaagaggagaacagagaggcctcaaaaccaaagctaggataagaaacttgtagcccaagagttatcttccagacaaagaagcctgagattccaacgcagcttcagagagtgctcactcaaaatgttactgaaactgtaggctttttaatgacttagccatgcctgcaaaaggcattccctaaggtggcacagaagatggagcccccatatccaaagatagccaaggagaaagaaagacccctgttgccagagccagtgggcaaaggcaacagaaaaggagacaagggtcctaatgggatgagatcctttcggatttaggcttttatacaaactcctgagaactggcaggttgacagccataaatggggtaccaaactttctactcattggattacaagttctcaggcatccagaatgattaacaaaatgacaatttctagggcttctgtgggagagtatggaaaggtctttttgaaccttttaatgctgtcaatggaagaatgatgaggttcataaatttggaaaggagacatttcttcatttttatgcttatttttatttttttttgagacagagtttcactcttgttgcccaggctggagtgcaatggcgtgatcttggctcactgcaacctccgcctcctgggttcaagcgattctcctgcctcagcctcctgattagctgggattacagatgcccaccaccacacctggctaattttttgcagttttggtagagacagggtttcatcatgttggccaggctggtctgaaactcctgacctcaggtgatccacccacctcggcctcccaaagtgctgggattacaggcatgagccacccacccagtgagagatttattttctataaagggttgtagcctgcagggttgtccttctgacaggctgggaagcatagcctccagccagaagccagaaacagatgcttcaaggaggaggtaaaggaaatagcaacttatgctgagtggaatggccaaatagatttatttaataagctctaggaggagtcatgaatatttatggaaggagaaatgcatgcacgcacaattgagtttcttgcttcttcatgggtcccatgtacaaaaaatggcagtgttagcatgatcccagggtggagttttcagccctctgacattaaaaggtgaagcagaggacatgaaaacttgctctgtgcatcctctgtacgctggccagaacctctccatcgtgggtggtctcttatcaggcaagaaaggagaggttgatatcagtagtggaggctttgaaagggctggtttctgttaaatccttagggaagaaagcctcatcatggttagcaaaggagggggtataacgatgtgtatcttaaccccatcatcccatcctagcaaagctgagaactcagttttgaaagttactctggggtcccctcagccaagagtgggtctgttcagtcagttgggagcttagaatttaattttcatttatcaatgctaatgggaaagagtacgctgtcttcatggcagctgaatttgcaagaaactccttggatggggttaatggcagctgtatttttctgggagctgtgctttaattggataaagtaagttctggtaagatttcttcatcttcagtatctcaaatgttttcatttaaataatctttataacaacttttgatgtctgagtggattcccacacagtcatctattgtaagactttctgattccttttttttcctttggtcattatgaatagggcttctgtaaataactgcatggtagcttttgatgggaaataacatcaaagtagttgtcaaaatacctaggaatgttatttttggattgtaaggtgagacttgtttagctttggaaaaaaatgcccaacttgtaataggggaggaaaaataattttctgtttttggaattcttagatggaacgctctgtaaaaactgacagattaaaatgagaaaaagagaaaagtttaaaaacatgtatatcttatggttacatgggatatactcagggaaaaatgagtaaatctccaacaggtggctttcaattcaagcataaatactatcttcaacttaaagaaagaagatttgaggtgcagtagtgggaagttaaccagcaaaagcacattagacaggggtaaggtttgttatacagagttaagtccatgcagtctccattgataagactcttcagtgatttagttatccttctcttcttggtgtcgagagaggtagcttttaaatggtgatttcctttatagatgtaaattttccttacacaagtaacttctactctgttttcacaacttcctttgttagcatttttttttcaaaataattagcttggaataatttttaagccaaagggacatattttggggttgcatattctggtttcctaccattatattttggggtggcatagtttggtcttatacactgtgttctactggcaatgaaaagagttcttgtttttcctccagcaatttgtcatttgttaaagagcttagcagttctaagagatatagaccagctgtgctatctttttgtggttttcagttctctagtatgttgagcatctttttgtaagtgtacttgccatctgtagatcttctttggtgaggtgtctgttcagatctgtgtgcatttttaattgggctgtttaacttattgtttagttttaacaattttttatatattttgaatacaaattctcagatctgtattttgcaaatattttcttcaatatgtggcttgtctttttgttctcttaacaaggtctcttccagagtataaactgtaaatattaagaaatccacattgtcatttcttctgtgtatatcaaccttctgtgtcatttgttaaaattcattaccaaacgcaaaggtacatagcttttcctctatagtttcttctagaaattgtatagttttgcatttttagtgtaaggatgattttgagtgattatttgtgtaagttgtaaagttttcgtctacatgcatatcatttcttatggtttccaattaatcattccctcactatttttgggaaagacacaggatagtgggctctgttagagtagatagctagctagacatgaacaggagggggagctcctggaaaagggaaagtctgtgaaggctcacgtggagggaccaccaaaaatgcatatattagtagcatctctagtgctggagtggatgggcacttgtcatttgtggttaggagggagaagaggtacctacgcagaaacaccctagaacttctcttgagatgccccaatcatcattcactctgcaataaaaatgtcagaatattgctagctacatgctgataagaaggagaaaggggacattcttaagagaaacctggcaccataagtacagattagggcagagaaagacattcaaaagaggcagctgcagtagatacaaacgtgaccgctgtcagcctgcctggtatggcgggaaggaggctggtgccagagtggattcggattgatcaccacacatgtacctcaatcaacagtgaggaggtcccacaaggctaagtggggcaagtcggggacctaaggcagtagcaggaaaaccaaagaaaacaggcggagacttgagacagaggcaggaatgtgaagaagtccaaaataaaaatccctgcacaggactcttaggctgttttcatgcactatgagcctactcctccctatttttgtacaataagctctttacactgtatttcttttcaatgaagttatcttccatctttgtactgcctcttggtgaaaagctgtcttccaagttaataactgggacatcagctctccgcagtaatagctccttttcagttttaatttgcagaactgatggggattaataactggcgctccgactttaagtggtgcaggaggcggccagtaggggacgccagccgttacaccgggagcaagagggccgtccgtagtccccatctgcctgcatgtggcgtgcagcgacgacaatggcagcaagagggcccggcagtgtgcccagctgccagcaggcgggtgtgctgccactataatgtgaggaagagggccctgcaatgtccctagctgccagcaggcggcgtgccaccactatactgcgagcaagagagccctgccgtgcccctgcgccagcacggggcgctggacaccactgtaagcaagagggccctgcagttgtcctagtcgccagtagggggcgcaatggcagagcaccgtgggcaagctggtcctgtagtgcccggctgcaagcagggggcgcccgaaacgggcttttcagattactcaggttcaactcgtctctgcgccgcgccgccggggacgtgtgtctctgcgcgtgcaccgcaccacctccgcgctccccgccgggcggcgcgcgactgtgcgactgcaacactcccagccaccctcagcccagcgacgtgcgtctctgcgcctgcgccgcgcctcactcccgcccgcccagcgacccctcccctccggggaggcgccggcgtgcgtctacgccctgcgccgcgtctccccaacagcggcgcgcctctctgcgcctgcgccggcgcgccgccccctctctgcgcctgcgccggcgcgccgccccctctctgcgcctgcgccggcgctccgccccctctctgcgcctgcgccggcgcgccgacccctctctgcgcctgcgccggcgcgccgccccctctctgcgcctgcgccggcgcgccgacccccccctctctgcgcctgcgccggcgcgccgaccccctctctgcgcctgcgccggcgcgccgacccccccccccctctctgcgcctgcgccggcgcgccgaccccctctctgcgcctgcgccggcgcgccgaccccctctctgcgcctccgccggcgcgccgcctttgcgagggcggagttgcgttctctttagcacacacccggagagcatcgcgacggcggagctgcgttctcctctgcacagacttcggggctattgcgaaggcggagcacagttcttctcaggtcagacccgggtgggcgggctgagggcagtgccagggcggagctgcgttctgttcagcacagacctggggggttagggttaggggtgccgttggggttggggttggggttagggttaggggttagggttagggttagggtttagggttagggtttagggttagggttagggttagggttagggttagggttagggttagggttagggttagggttagggttagggttagggttnnnnnnnnnnnnnnnnnnnnnnnnnnnnnnnnnnnnnnnnnnnnnnnnnnnnnnnnnnnnnnnnnnnnnnnnnnnnnnnnnnnnnnnnnnnnnnnnnnnnnnnnnnnnnnnnnnnnnnnnnnnnnnnnnnnnnnnnnnnnnnnnnnnnnnnnnnnnnnnnnnnnnnnnnnnnnnnnnnnnnnnnnnnnnnnnnnnnnnnnnnnnnnnnnnnnnnnnnnnnnnnnnnnnnnnnnnnnnnnnnnnnnnnnnnnnnnnnnnnnnnnnnnnnnnnnnnnnnnnnnnnnnnnnnnnnnnnnnnnnnnnnnnnnnnnnnnnnnnnnnnnnnnnnnnnnnnnnnnnnnnnnnnnnnnnnnnnnnnnnnnnnnnnnnnnnnnnnnnnnnnnnnnnnnnnnnnnnnnnnnnnnnnnnnnnnnnnnnnnnnnnnnnnnnnnnnnnnnnnnnnnnnnnnnnnnnnnnnnnnnnnnnnnnnnnnnnnnnnnnnnnnnnnnnnnnnnnnnnnnnnnnnnnnnnnnnnnnnnnnnnnnnnnnnnnnnnnnnnnnnnnnnnnnnnnnnnnnnnnnnnnnnnnnnnnnnnnnnnnnnnnnnnnnnnnnnnnnnnnnnnnnnnnnnnnnnnnnnnnnnnnnnnnnnnnnnnnnnnnnnnnnnnnnnnnnnnnnnnnnnnnnnnnnnnnnnnnnnnnnnnnnnnnnnnnnnnnnnnnnnnnnnnnnnnnnnnnnnnnnnnnnnnnnnnnnnnnnnnnnnnnnnnnnnnnnnnnnnnnnnnnnnnnnnnnnnnnnnnnnnnnnnnnnnnnnnnnnnnnnnnnnnnnnnnnnnnnnnnnnnnnnnnnnnnnnnnnnnnnnnnnnnnnnnnnnnnnnnnnnnnnnnnnnnnnnnnnnnnnnnnnnnnnnnnnnnnnnnnnnnnnnnnnnnnnnnnnnnnnnnnnnnnnnnnnnnnnnnnnnnnnnnnnnnnnnnnnnnnnnnnnnnnnnnnnnnnnnnnnnnnnnnnnnnnnnnnnnnnnnnnnnnnnnnnnnnnnnnnnnnnnnnnnnnnnnnnnnnnnnnnnnnnnnnnnnnnnnnnnnnnnnnnnnnnnnnnnnnnnnnnnnnnnnnnnnnnnnnnnnnnnnnnnnnnnnnnnnnnnnnnnnnnnnnnnnnnnnnnnnnnnnnnnnnnnnnnnnnnnnnnnnnnnnnnnnnnnnnnnnnnnnnnnnnnnnnnnnnnnnnnnnnnnnnnnnnnnnnnnnnnnnnnnnnnnnnnnnnnnnnnnnnnnnnnnnnnnnnnnnnnnnnnnnnnnnnnnnnnnnnnnnnnnnnnnnnnnnnnnnnnnnnnnnnnnnnnnnnnnnnnnnnnnnnnnnnnnnnnnnnnnnnnnnnnnnnnnnnnnnnnnnnnnnnnnnnnnnnnnnnnnnnnnnnnnnnnnnnnnnnnnnnnnnnnnnnnnnnnnnnnnnnnnnnnnnnnnnnnnnnnnnnnnnnnnnnnnnnnnnnnnnnnnnnnnnnnnnnnnnnnnnnnnnnnnnnnnnnnnnnnnnnnnnnnnnnnnnnnnnnnnnnnnnnnnnnnnnnnnnnnnnnnnnnnnnnnnnnnnnnnnnnnnnnnnnnnnnnnnnnnnnnnnnnnnnnnnnnnnnnnnnnnnnnnnnnnnnnnnnnnnnnnnnnnnnnnnnnnnnnnnnnnnnnnnnnnnnnnnnnnnnnnnnnnnnnnnnnnnnnnnnnnnnnnnnnnnnnnnnnnnnnnnnnnnnnnnnnnnnnnnnnnnnnnnnnnnnnnnnnnnnnnnnnnnnnnnnnnnnnnnnnnnnnnnnnnnnnnnnnnnnnnnnnnnnnnnnnnnnnnnnnnnnnnnnnnnnnnnnnnnnnnnnnnnnnnnnnnnnnnnnnnnnnnnnnnnnnnnnnnnnnnnnnnnnnnnnnnnnnnnnnnnnnnnnnnnnnnnnnnnnnnnnnnnnnnnnnnnnnnnnnnnnnnnnnnnnnnnnnnnnnnnnnnnnnnnnnnnnnnnnnnnnnnnnnnnnnnnnnnnnnnnnnnnnnnnnnnnnnnnnnnnnnnnnnnnnnnnnnnnnnnnnnnnnnnnnnnnnnnnnnnnnnnnnnnnnnnnnnnnnnnnnnnnnnnnnnnnnnnnnnnnnnnnnnnnnnnnnnnnnnnnnnnnnnnnnnnnnnnnnnnnnnnnnnnnnnnnnnnnnnnnnnnnnnnnnnnnnnnnnnnnnnnnnnnnnnnnnnnnnnnnnnnnnnnnnnnnnnnnnnnnnnnnnnnnnnnnnnnnnnnnnnnnnnnnnnnnnnnnnnnnnnnnnnnnnnnnnnnnnnnnnnnnnnnnnnnnnnnnnnnnnnnnnnnnnnnnnnnnnnnnnnnnnnnnnnnnnnnnnnnnnnnnnnnnnnnnnnnnnnnnnnnnnnnnnnnnnnnnnnnnnnnnnnnnnnnnnnnnnnnnnnnnnnnnnnnnnnnnnnnnnnnnnnnnnnnnnnnnnnnnnnnnnnnnnnnnnnnnnnnnnnnnnnnnnnnnnnnnnnnnnnnnnnnnnnnnnnnnnnnnnnnnnnnnnnnnnnnnnnnnnnnnnnnnnnnnnnnnnnnnnnnnnnnnnnnnnnnnnnnnnnnnnnnnnnnnnnnnnnnnnnnnnnnnnnnnnnnnnnnnnnnnnnnnnnnnnnnnnnnnnnnnnnnnnnnnnnnnnnnnnnnnnnnnnnnnnnnnnnnnnnnnnnnnnnnnnnnnnnnnnnnnnnnnnnnnnnnnnnnnnnnnnnnnnnnnnnnnnnnnnnnnnnnnnnnnnnnnnnnnnnnnnnnnnnnnnnnnnnnnnnnnnnnnnnnnnnnnnnnnnnnnnnnnnnnnnnnnnnnnnnnnnnnnnnnnnnnnnnnnnnnnnnnnnnnnnnnnnnnnnnnnnnnnnnnnnnnnnnnnnnnnnnnnnnnnnnnnnnnnnnnnnnnnnnnnnnnnnnnnnnnnnnnnnnnnnnnnnnnnnnnnnnnnnnnnnnnnnnnnnnnnnnnnnnnnnnnnnnnnnnnnnnnnnnnnnnnnnnnnnnnnnnnnnnnnnnnnnnnnnnnnnnnnnnnnnnnnnnnnnnnnnnnnnnnnnnnnnnnnnnnnnnnnnnnnnnnnnnnnnnnnnnnnnnnnnnnnnnnnnnnnnnnnnnnnnnnnnnnnnnnnnnnnnnnnnnnnnnnnnnnnnnnnnnnnnnnnnnnnnnnnnnnnnnnnnnnnnnnnnnnnnnnnnnnnnnnnnnnnnnnnnnnnnnnnnnnnnnnnnnnnnnnnnnnnnnnnnnnnnnnnnnnnnnnnnnnnnnnnnnnnnnnnnnnnnnnnnnnnnnnnnnnnnnnnnnnnnnnnnnnnnnnnnnnnnnnnnnnnnnnnnnnnnnnnnnnnnnnnnnnnnnnnnnnnnnnnnnnnnnnnnnnnnnnnnnnnnnnnnnnnnnnnnnnnnnnnnnnnnnnnnnnnnnnnnnnnnnnnnnnnnnnnnnnnnnnnnnnnnnnnnnnnnnnnnnnnnnnnnnnnnnnnnnnnnnnnnnnnnnnnnnnnnnnnnnnnnnnnnnnnnnnnnnnnnnnnnnnnnnnnnnnnnnnnnnnnnnnnnnnnnnnnnnnnnnnnnnnnnnnnnnnnnnnnnnnnnnnnnnnnnnnnnnnnnnnnnnnnnnnnnnnnnnnnnnnnnnnnnnnnnnnnnnnnnnnnnnnnnnnnnnnnnnnnnnnnnnnnnnnnnnnnnnnnnnnnnnnnnnnnnnnnnnnnnnnnnnnnnnnnnnnnnnnnnnnnnnnnnnnnnnnnnnnnnnnnnnnnnnnnnnnnnnnnnnnnnnnnnnnnnnnnnnnnnnnnnnnnnnnnnnnnnnnnnnnnnnnnnnnnnnnnnnnnnnnnnnnnnnnnnnnnnnnnnnnnnnnnnnnnnnnnnnnnnnnnnnnnnnnnnnnnnnnnnnnnnnnnnnnnnnnnnnnnnnnnnnnnnnnnnnnnnnnnnnnnnnnnnnnnnnnnnnnnnnnnnnnnnnnnnnnnnnnnnnnnnnnnnnnnnnnnnnnnnnnnnnnnnnnnnnnnnnnnnnnnnnnnnnnnnnnnnnnnnnnnnnnnnnnnnnnnnnnnnnnnnnnnnnnnnnnnnnnnnnnnnnnnnnnnnnnnnnnnnnnnnnnnnnnnnnnnnnnnnnnnnnnnnnnnnnnnnnnnnnnnnnnnnnnnnnnnnnnnnnnnnnnnnnnnnnnnnnnnnnnnnnnnnnnnnnnnnnnnnnnnnnnnnnnnnnnnnnnnnnnnnnnnnnnnnnnnnnnnnnnnnnnnnnnnnnnnnnnnnnnnnnnnnnnnnnnnnnnnnnnnnnnnnnnnnnnnnnnnnnnnnnnnnnnnnnnnnnnnnnnnnnnnnnnnnnnnnnnnnnnnnnnnnnnnnnnnnnnnnnnnnnnnnnnnnnnnnnnnnnnnnnnnnnnnnnnnnnnnnnnnnnnnnnnnnnnnnnnnnnnnnnnnnnnnnnnnnnnnnnnnnnnnnnnnnnnnnnnnnnnnnnnnnnnnnnnnnnnnnnnnnnnnnnnnnnnnnnnnnnnnnnnnnnnnnnnnnnnnnnnnnnnnnnnnnnnnnnnnnnnnnnnnnnnnnnnnnnnnnnnnnnnnnnnnnnnnnnnnnnnnnnnnnnnnnnnnnnnnnnnnnnnnnnnnnnnnnnnnnnnnnnnnnnnnnnnnnnnnnnnnnnnnnnnnnnnnnnnnnnnnnnnnnnnnnnnnnnnnnnnnnnnnnnnnnnnnnnnnnnnnnnnnnnnnnnnnnnnnnnnnnnnnnnnnnnnnnnnnnnnnnnnnnnnnnnnnnnnnnnnnnnnnnnnnnnnnnnnnnnnnnnnnnnnnnnnnnnnnnnnnnnnnnnnnnnnnnnnnnnnnnnnnnnnnnnnnnnnnnnnnnnnnnnnnnnnnnnnnnnnnnnnnnnnnnnnnnnnnnnnnnnnnnnnnnnnnnnnnnnnnnnnnnnnnnnnnnnnnnnnnnnnnnnnnnnnnnnnnnnnnnnnnnnnnnnnnnnnnnnnnnnnnnnnnnnnnnnnnnnnnnnnnnnnnnnnnnnnnnnnnnnnnnnnnnnnnnnnnnnnnnnnnnnnnnnnnnnnnnnnnnnnnnnnnnnnnnnnnnnnnnnnnnnnnnnnnnnnnnnnnnnnnnnnnnnnnnnnnnnnnnnnnnnnnnnnnnnnnnnnnnnnnnnnnnnnnnnnnnnnnnnnnnnnnnnnnnnnnnnnnnnnnnnnnnnnnnnnnnnnnnnnnnnnnnnnnnnnnnnnnnnnnnnnnnnnnnnnnnnnnnnnnnnnnnnnnnnnnnnnnnnnnnnnnnnnnnnnnnnnnnnnnnnnnnnnnnnnnnnnnnnnnnnnnnnnnnnnnnnnnnnnnnnnnnnnnnnnnnnnnnnnnnnnnnnnnnnnnnnnnnnnnnnnnnnnnnnnnnnnnnnnnnnnnnnnnnnnnnnnnnnnnnnnnnnnnnnnnnnnnnnnnnnnnnnnnnnnnnnnnnnnnnnnnnnnnnnnnnnnnnnnnnnnnnnnnnnnnnnnnnnnnnnnnnnnnnnnnnnnnnnnnnnnnnnnnnnnnnnnnnnnnnnnnnnnnnnnnnnnnnnnnnnnnnnnnnnnnnnnnnnnnnnnnnnnnnnnnnnnnnnnnnnnnnnnnnnnnnnnnnnnnnnnnnnnnnnnnnnnnnnnnnnnnnnnnnnnnnnnnnnnnnnnnnnnnnnnnnnnnnnnnnnnnnnnnnnnnnnnnnnnnnnnnnnnnnnnnnnnnnnnnnnnnnnnnnnnnnnnnnnnnnnnnnnnnnnnnnnnnnnnnnnnnnnnnnnnnnnnnnnnnnnnnnnnnnnnnnnnnnnnnnnnnnnnnnnnnnnnnnnnnnnnnnnnnnnnnnnnnnnnnnnnnnnnnnnnnnnnnnnnnnnnnnnnnnnnnnnnnnnnnnnnnnnnnnnnnnnnnnnnnnnnnnnnnnnnnnnnnnnnnnnnnnnnnnnnnnnnnnnnnnnnnnnnnnnnnnnnnnnnnnnnnnnnnnnnnnnnnnnnnnnnnnnnnnnnnnnnnnnnnnnnnnnnnnnnnnnnnnnnnnnnnnnnnnnnnnnnnnnnnnnnnnnnnnnnnnnnnnnnnnnnnnnnnnnnnnnnnnnnnnnnnnnnnnnnnnnnnnnnnnnnnnnnnnnnnnnnnnnnnnnnnnnnnnnnnnnnnnnnnnnnnnnnnnnnnnnnnnnnnnnnnnnnnnnnnnnnnnnnnnnnnnnnnnnnnnnnnnnnnnnnnnnnnnnnnnnnnnnnnnnnnnnnnnnnnnnnnnnnnnnnnnnnnnnnnnnnnnnnnnnnnnnnnnnnnnnnnnnnnnnnnnnnnnnnnnnnnnnnnnnnnnnnnnnnnnnnnnnnnnnnnnnnnnnnnnnnnnnnnnnnnnnnnnnnnnnnnnnnnnnnnnnnnnnnnnnnnnnnnnnnnnnnnnnnnnnnnnnnnnnnnnnnnnnnnnnnnnnnnnnnnnnnnnnnnnnnnnnnnnnnnnnnnnnnnnnnnnnnnnnnnnnnnnnnnnnnnnnnnnnnnnnnnnnnnnnnnnnnnnnnnnnnnnnnnnnnnnnnnnnnnnnnnnnnnnnnnnnnnnnnnnnnnnnnnnnnnnnnnnnnnnnnnnnnnnnnnnnnnnnnnnnnnnnnnnnnnnnnnnnnnnnnnnnnnnnnnnnnnnnnnnnnnnnnnnnnnnnnnnnnnnnnnnnnnnnnnnnnnnnnnnnnnnnnnnnnnnnnnnnnnnnnnnnnnnnnnnnnnnnnnnnnnnnnnnnnnnnnnnnnnnnnnnnnnnnnnnnnnnnnnnnnnnnnnnnnnnnnnnnnnnnnnnnnnnnnnnnnnnnnnnnnnnnnnnnnnnnnnnnnnnnnnnnnnnnnnnnnnnnnnnnnnnnnnnnnnnnnnnnnnnnnnnnnnnnnnnnnnnnnnnnnnnnnnnnnnnnnnnnnnnnnnnnnnnnnnnnnnnnnnnnnnnnnnnnnnnnnnnnnnnnnnnnnnnnnnnnnnnnnnnnnnnnnnnnnnnnnnnnnnnnnnnnnnnnnnnnnnnnnnnnnnnnnnnnnnnnnnnnnnnnnnnnnnnnnnnnnnnnnnnnnnnnnnnnnnnnnnnnnnnnnnnnnnnnnnnnnnnnnnnnnnnnnnnnnnnnnnnnnnnnnnnnnnnnnnnnnnnnnnnnnnnnnnnnnnnnnnnnnnnnnnnnnnnnnnnnnnnnnnnnnnnnnnnnnnnnnnnnnnnnnnnnnnnnnnnnnnnnnnnnnnnnnnnnnnnnnnnnnnnnnnnnnnnnnnnnnnnnnnnnnnnnnnnnnnnnnnnnnnnnnnnnnnnnnnnnnnnnnnnnnnnnnnnnnnnnnnnnnnnnnnnnnnnnnnnnnnnnnnnnnnnnnnnnnnnnnnnnnnnnnnnnnnnnnnnnnnnnnnnnnnnnnnnnnnnnnnnnnnnnnnnnnnnnnnnnnnnnnnnnnnnnnnnnnnnnnnnnnnnnnnnnnnnnnnnnnnnnnnnnnnnnnnnnnnnnnnnnnnnnnnnnnnnnnnnnnnnnnnnnnnnnnnnnnnnnnnnnnnnnnnnnnnnnnnnnnnnnnnnnnnnnnnnnnnnnnnnnnnnnnnnnnnnnnnnnnnnnnnnnnnnnnnnnnnnnnnnnnnnnnnnnnnnnnnnnnnnnnnnnnnnnnnnnnnnnnnnnnnnnnnnnnnnnnnnnnnnnnnnnnnnnnnnnnnnnnnnnnnnnnnnnnnnnnnnnnnnnnnnnnnnnnnnnnnnnnnnnnnnnnnnnnnnnnnnnnnnnnnnnnnnnnnnnnnnnnnnnnnnnnnnnnnnnnnnnnnnnnnnnnnnnnnnnnnnnnnnnnnnnnnnnnnnnnnnnnnnnnnnnnnnnnnnnnnnnnnnnnnnnnnnnnnnnnnnnnnnnnnnnnnnnnnnnnnnnnnnnnnnnnnnnnnnnnnnnnnnnnnnnnnnnnnnnnnnnnnnnnnnnnnnnnnnnnnnnnnnnnnnnnnnnnnnnnnnnnnnnnnnnnnnnnnnnnnnnnnnnnnnnnnnnnnnnnnnnnnnnnnnnnnnnnnnnnnnnnnnnnnnnnnnnnnnnnnnnnnnnnnnnnnnnnnnnnnnnnnnnnnnnnnnnnnnnnnnnnnnnnnnnnnnnnnnnnnnnnnnnnnnnnnnnnnnnnnnnnnnnnnnnnnnnnnnnnnnnnnnnnnnnnnnnnnnnnnnnnnnnnnnnnnnnnnnnnnnnnnnnnnnnnnnnnnnnnnnnnnnnnnnnnnnnnnnnnnnnnnnnnnnnnnnnnnnnnnnnnnnnnnnnnnnnnnnnnnnnnnnnnnnnnnnnnnnnnnnnnnnnnnnnnnnnnnnnnnnnnnnnnnnnnnnnnnnnnnnnnnnnnnnnnnnnnnnnnnnnnnnnnnnnnnnnnnnnnnnnnnnnnnnnnnnnnnnnnnnnnnnnnnnnnnnnnnnnnnnnnnnnnnnnnnnnnnnnnnnnnnnnnnnnnnnnnnnnnnnnnnnnnnnnnnnnnnnnnnnnnnnnnnnnnnnnnnnnnnnnnnnnnnnnnnnnnnnnnnnnnnnnnnnnnnnnnnnnnnnnnnnnnnnnnnnnnnnnnnnnnnnnnnnnnnnnnnnnnnnnnnnnnnnnnnnnnnnnnnnnnnnnnnnnnnnnnnnnnnnnnnnnnnnnnnnnnnnnnnnnnnnnnnnnnnnnnnnnnnnnnnnnnnnnnnnnnnnnnnnnnnnnnnnnnnnnnnnnnnnnnnnnnnnnnnnnnnnnnnnnnnnnnnnnnnnnnnnnnnnnnnnnnnnnnnnnnnnnnnnnnnnnnnnnnnnnnnnnnnnnnnnnnnnnnnnnnnnnnnnnnnnnnnnnnnnnnnnnnnnnnnnnnnnnnnnnnnnnnnnnnnnnnnnnnnnnnnnnnnnnnnnnnnnnnnnnnnnnnnnnnnnnnnnnnnnnnnnnnnnnnnnnnnnnnnnnnnnnnnnnnnnnnnnnnnnnnnnnnnnnnnnnnnnnnnnnnnnnnnnnnnnnnnnnnnnnnnnnnnnnnnnnnnnnnnnnnnnnnnnnnnnnnnnnnnnnnnnnnnnnnnnnnnnnnnnnnnnnnnnnnnnnnnnnnnnnnnnnnnnnnnnnnnnnnnnnnnnnnnnnnnnnnnnnnnnnnnnnnnnnnnnnnnnnnnnnnnnnnnnnnnnnnnnnnnnnnnnnnnnnnnnnnnnnnnnnnnnnnnnnnnnnnnnnnnnnnnnnnnnnnnnnnnnnnnnnnnnnnnnnnnnnnnnnnnnnnnnnnnnnnnnnnnnnnnnnnnnnnnnnnnnnnnnnnnnnnnnnnnnnnnnnnnnnnnnnnnnnnnnnnnnnnnnnnnnnnnnnnnnnnnnnnnnnnnnnnnnnnnnnnnnnnnnnnnnnnnnnnnnnnnnnnnnnnnnnnnnnnnnnnnnnnnnnnnnnnnnnnnnnnnnnnnnnnnnnnnnnnnnnnnnnnnnnnnnnnnnnnnnnnnnnnnnnnnnnnnnnnnnnnnnnnnnnnnnnnnnnnnnnnnnnnnnnnnnnnnnnnnnnnnnnnnnnnnnnnnnnnnnnnnnnnnnnnnnnnnnnnnnnnnnnnnnnnnnnnnnnnnnnnnnnnnnnnnnnnnnnnnnnnnnnnnnnnnnnnnnnnnnnnnnnnnnnnnnnnnnnnnnnnnnnnnnnnnnnnnnnnnnnnnnnnnnnnnnnnnnnnnnnnnnnnnnnnnnnnnnnnnnnnnnnnnnnnnnnnnnnnnnnnnnnnnnnnnnnnnnnnnnnnnnnnnnnnnnnnnnnnnnnnnnnnnnnnnnnnnnnnnnnnnnnnnnnnnnnnnnnnnnnnnnnnnnnnnnnnnnnnnnnnnnnnnnnnnnnnnnnnnnnnnnnnnnnnnnnnnnnnnnnnnnnnnnnnnnnnnnnnnnnnnnnnnnnnnnnnnnnnnnnnnnnnnnnnnnnnnnnnnnnnnnnnnnnnnnnnnnnnnnnnnnnnnnnnnnnnnnnnnnnnnnnnnnnnnnnnnnnnnnnnnnnnnnnnnnnnnnnnnnnnnnnnnnnnnnnnnnnnnnnnnnnnnnnnnnnnnnnnnnnnnnnnnnnnnnnnnnnnnnnnnnnnnnnnnnnnnnnnnnnnnnnnnnnnnnnnnnnnnnnnnnnnnnnnnnnnnnnnnnnnnnnnnnnnnnnnnnnnnnnnnnnnnnnnnnnnnnnnnnnnnnnnnnnnnnnnnnnnnnnnnnnnnnnnnnnnnn

SEQ ID NO: 3 - DNA, 20 bp, Artificial Sequence
  Description of Artificial Sequence: Synthetic primer
aatttcctggtgtgctttgg

SEQ ID NO: 4 - DNA, 21 bp, Artificial Sequence
  Description of Artificial Sequence: Synthetic primer
gacccacacctcacaaattga

SEQ ID NO: 5 - DNA, 23 bp, Artificial Sequence
  Description of Artificial Sequence: Synthetic primer
atgagtttttcccttatggggac

SEQ ID NO: 6 - DNA, 23 bp, Artificial Sequence
  Description of Artificial Sequence: Synthetic primer
atgaagacactactgaccatcct

SEQ ID NO: 7 - DNA, 23 bp, Artificial Sequence
  Description of Artificial Sequence: Synthetic primer
ttcagatgggcatgaatgtttct

SEQ ID NO: 8 - DNA, 20 bp, Artificial Sequence
  Description of Artificial Sequence: Synthetic primer
gtactgctggctcacctctg

SEQ ID NO: 9 - DNA, 20 bp, Artificial Sequence
  Description of Artificial Sequence: Synthetic primer
caatgacaaggtgtcctgcc

SEQ ID NO: 10 - DNA, 21 bp, Artificial Sequence
  Description of Artificial Sequence: Synthetic primer
ccgatgtcaccacttctgctg

SEQ ID NO: 11 - DNA, 20 bp, Artificial Sequence
  Description of Artificial Sequence: Synthetic primer
tgatggaacaaccacctcac

SEQ ID NO: 12 - DNA, 19 bp, Artificial Sequence
  Description of Artificial Sequence: Synthetic primer
gtggccttgctcatggtgt

SEQ ID NO: 13 - DNA, 22 bp, Artificial Sequence
  Description of Artificial Sequence: Synthetic primer
tcacctggtcctcaacagtatt

SEQ ID NO: 14 - DNA, 20 bp, Artificial Sequence
  Description of Artificial Sequence: Synthetic primer
cagacctggtttgatgcaga

SEQ ID NO: 15 - DNA, 22 bp, Artificial Sequence
  Description of Artificial Sequence: Synthetic primer
ttcctgtcctccatgatcaaaa

SEQ ID NO: 16 - DNA, 20 bp, Artificial Sequence
  Description of Artificial Sequence: Synthetic primer
taccaccatgtacccaggca

SEQ ID NO: 17 - DNA, 20 bp, Artificial Sequence
  Description of Artificial Sequence: Synthetic primer
accagaccaacttctgggtg

SEQ ID NO: 18 - DNA, 21 bp, Artificial Sequence
  Description of Artificial Sequence: Synthetic primer
agtaggccacattacactgct

SEQ ID NO: 19 - DNA, 21 bp, Artificial Sequence
  Description of Artificial Sequence: Synthetic primer
gctggaagttggacacctcaa

SEQ ID NO: 20 - DNA, 20 bp, Artificial Sequence
  Description of Artificial Sequence: Synthetic primer
cagccactttctctctccgt

SEQ ID NO: 21 - DNA, 23 bp, Artificial Sequence
  Description of Artificial Sequence: Synthetic primer
ccaaatccgagctgttgttctat

SEQ ID NO: 22 - DNA, 18 bp, Artificial Sequence
  Description of Artificial Sequence: Synthetic primer
tccaattccatcccaaaa

SEQ ID NO: 23 - DNA, 20 bp, Artificial Sequence
  Description of Artificial Sequence: Synthetic primer
gtgctctccaaactctctgg

SEQ ID NO: 24 - DNA, 21 bp, Artificial Sequence
  Description of Artificial Sequence: Synthetic primer
gcagagcaaggcgtgatacag

SEQ ID NO: 25 - DNA, 19 bp, Artificial Sequence
  Description of Artificial Sequence: Synthetic primer
ggatgcaggtgaggtattc

SEQ ID NO: 26 - DNA, 19 bp, Artificial Sequence
  Description of Artificial Sequence: Synthetic primer
ggacgaaggtgacatgcct

SEQ ID NO: 27 - DNA, 21 bp, Artificial Sequence
  Description of Artificial Sequence: Synthetic primer
ggagcgataagccttgtaacc

SEQ ID NO: 28 - DNA, 20 bp, Artificial Sequence
  Description of Artificial Sequence: Synthetic primer
gaagcctcagcgctattgag

SEQ ID NO: 29 - DNA, 21 bp, Artificial Sequence
  Description of Artificial Sequence: Synthetic primer
catccacctctgttgggttca

SEQ ID NO: 30 - DNA, 23 bp, Artificial Sequence
  Description of Artificial Sequence: Synthetic primer
ctcaggaggagcaatgatcttga
